(19) United States
(12) Patent Application Publication
(10) Pub. No.: US 2023/0272367 A1
(43) Pub. Date: Aug. 31, 2023

(54) METHODS FOR MODULATING RNA SPLICING

(71) Applicant: PTC THERAPEUTICS, INC., South Plainfield, NJ (US)

(72) Inventors: Anuradha Bhattacharyya, Edison, NJ (US); Amal Dakka, Whitehouse Station, NJ (US); Kerstin Effenberger, Metuchen, NJ (US); Vijayalakshmi Gabbeta, Bridgewater, NJ (US); Wencheng Li, Bedminster, NJ (US); Nikolai Naryshkin, East Brunswick, NJ (US); Christopher Trotta, Somerset, NJ (US); Kari Wiedinger, New Providence, NJ (US)

(73) Assignee: PTC THERAPEUTICS, INC., South Plainfield, NJ (US)

(21) Appl. No.: 18/316,871

(22) Filed: May 12, 2023

Related U.S. Application Data
(62) Division of application No. 16/463,775, filed on May 23, 2019, now Pat. No. 11,702,646.
(60) Provisional application No. 62/426,619, filed on Nov. 28, 2016.

(51) Int. Cl. C12N 15/10; C07C 255/00; C07C 291/00

(52) U.S. Cl. CPC C12N 15/10; C12N 15/102; C07C 255/00; C07C 291/00

(57) ABSTRACT

In one aspect, described herein is an intronic recognition element for splicing modifier (iREMS) that can be recognized by a compound provided herein. In another aspect, described herein are methods for modulating the amount of a product of a gene, wherein a precursor RNA transcript transcribed from the gene contains an intronic REMS, and the methods utilizing a compound described herein. More particularly, described herein are methods for modulating the amount of an RNA transcript or protein product encoded by a gene, wherein a precursor RNA transcript transcribed from the gene comprises an intronic REMS, and the methods utilizing a compound described herein. In another aspect, provided herein are artificial gene constructs comprising an intronic REMS, and uses of those artificial gene constructs to modulate protein production. In another aspect, provided herein are methods for altering endogenous genes to comprise an intronic REMS, and the use of a compound described herein to modulate protein produced from such altered endogenous genes.

### CROSS-REFERENCE TO RELATED APPLICATIONS

[0001] This application claims the benefit of provisional application No. 62/426,619, filed on Nov. 28, 2016, which is incorporated by reference herein in its entirety.

### REFERENCE TO SEQUENCE LISTING SUBMITTED ELECTRONICALLY

[0002] This application incorporates by reference a Sequence Listing submitted with this application as a text file entitled “10589-275-228_Sequence_Listing.txt” created on Nov. 18, 2017 and having a size of 1,112 kilobytes.

### INTRODUCTION

[0003] In one aspect, described herein is a recognition element for splicing modifier (REMS) present in an intron (i.e., an “intronic REMS” or iREMS) that can be recognized as a 5′ splice site by the U1 snRNP and/or other components of the pre-mRNA splicing machinery in the presence of a small molecule splicing modifier, wherein gene expression is modulated by inducing alternative splicing of intronic exons (iExons) in the transcribed RNA. In another aspect, described herein are methods for modulating the amount of a product of a gene, wherein a precursor RNA transcript transcribed from the gene contains an intronic REMS, a branch point and a 3′ splice site, and the methods utilize a small molecule compound described herein to induce alternative splicing of iExons. More particularly, described herein are methods for modulating the amount of an RNA transcript or protein product encoded by a gene via alternative splicing of iExons, wherein a precursor RNA transcript transcribed from the gene comprises an endogenous or non-endogenous intronic REMS, and the methods utilize a compound described herein to induce iExon alternative splicing. In another aspect, provided herein are artificial gene constructs comprising an intronic REMS (including an endogenous or non-endogenous intronic REMS), and uses of those artificial gene constructs to modulate protein production via iExon alternative splicing in the presence of a small molecule splicing modifier compound. In another aspect, provided herein are methods for altering genes to comprise an endogenous or non-endogenous intronic REMS, and the use of a small molecule compound described herein to induce alternative splicing of iExons, subsequently modulating the amount and type of protein produced from such altered endogenous or non-endogenous gene transcripts.

### BACKGROUND

[0004] Diseases associated with expression of an aberrant gene product (e.g., where the production of an aberrant RNA transcript or protein causes a disease) are often treated with a focus on affecting aberrant protein expression. However, targeting components of the splicing process responsible for production of aberrant RNA before the aberrant protein is expressed by using a small molecule may affect the underlying cause of a disease or disorder, and thus more efficiently prevent or ameliorate the disease or disorder caused by expression of the aberrant gene product. Accordingly, there is a need for methods of modulating the expression of aberrant RNA transcripts encoded by certain genes using small molecules to prevent or treat diseases associated with expression of aberrant RNA transcripts or associated proteins.

### SUMMARY

[0005] In one aspect, provided herein is a recognition element for splicing modifier (otherwise referred to as “REMS”) present in an intron (i.e., an “intronic REMS”) capable of being recognized by the U1 snRNP and/or other components of the pre-mRNA splicing machinery in the presence of a small molecule splicing modifier, whereby elements of the splicing reaction are affected as further described herein. In a specific embodiment, the intronic REMS comprises the nucleotide sequence GAgurngn (SEQ ID NO: 2) at the RNA level, wherein r is A or G (i.e., a purine nucleotide adenine or guanine) and n is any nucleotide. In another specific embodiment, the intronic REMS comprises the nucleotide sequence GAguragu (SEQ ID NO: 3866) at the RNA level, wherein r is adenine or guanine. In a specific embodiment, the intronic REMS comprises the nucleotide sequence NNGAgurngn (SEQ ID NO: 1) at the RNA level, wherein r is A or G (i.e., a purine nucleotide adenine or guanine) and n or N is any nucleotide. In another specific embodiment, the intronic REMS comprises the nucleotide sequence NNGAguragu (SEQ ID NO: 3862) at the RNA level, wherein r is adenine or guanine and N is any nucleotide. In one or more of such specific embodiments provided herein, N is adenine or guanine.

[0006] In another aspect, in addition to the intronic REMS sequence, the RNA transcript comprises an upstream branch point and a functional upstream iExon 3′ splice site. In certain embodiments including, but not limited to, iExons, an exon 5′ splice site, a branch point and the functional iExon 3′ splice site upstream from the intronic REMS are further linked to a downstream branch point and 3′ splice site of a downstream exon (see, for example, FIG. 1A). In other embodiments including, but not limited to, extended exons, the branch point and the functional 3′ splice site for an exon are downstream from the intronic REMS sequences (see, for example, FIGS. 1B and 1C). In a particular embodiment, an RNA sequence comprises two exons and an intron, wherein one exon is upstream of the intron and the other exon is downstream of the intron, and wherein the intron comprises in 5′ to 3′ order: a first 5′ splice site, a first branch point, a first 3′ splice site (also referred to as an iExon 3′ splice site), an iREMS, a second branch point, and a second 3′ splice site. In the presence of a compound described herein, the iREMS sequence functions as a 5′ splice site, causing the NNGA (SEQ ID NO: 3863) nucleotides of the iREMS and the intronic nucleotides downstream of the first 3′ splice site to be retained and spliced as an intronic exon to provide a non-wild-type mRNA. In other words, the nucleotides between the iREMS and the first 3′ splice site are retained and form the intronic exon, which results in the expression of a non-wild-type mRNA sequence. In the presence of a compound described herein, the iREMS sequence functions as a 5′ splice site, causing the NNGA (SEQ ID NO: 3863) nucleotides of the iREMS and the intronic nucleotides between the 3′ iExon splice site to be retained and spliced as an intronic exon to provide a non-wild-type mRNA. In other aspects, in the presence of a compound described herein and a downstream branch point, the intronic REMS will undergo splicing with the 3′ splice site of a downstream exon. In this aspect, the intronic REMS is located downstream of an exon such that there is no intervening upstream branch point and iExon 3′ splice site between the exon and the REMS sequence. In the presence of a compound described herein, the exon 5′ splice site does not undergo splicing with the downstream 3′ splice site. Instead, functioning as a 5′ splice site in the presence of a compound described herein, the iREMS sequence undergoes splicing with the downstream 3′ splice site. In other embodiments, in the presence of a compound described herein, an upstream exon 5′ splice site, an upstream branch point, and a functional iExon 3′ splice site upstream from the intronic REMS, will undergo splicing. In certain embodiments, one or more sequence elements necessary to form an iExon splice junction may be present endogenously or non-endogenously. For example, one or more of the following sequence elements may be present naturally in an intron or an intron may be engineered to comprise one or more of the following sequences in 5′ to 3′ order: a first 5′ splice site, a first branch point, a first 3′ splice site, an iREMS, a second branch point, and a second 3′ splice site. In certain embodiments, one or more snRNPs and trans factor elements necessary for splicing may be present beyond endogenous levels as a result of the presence of a compound described herein at various splice inducing sequence combinations. Without being bound by any theory or mechanism, the small molecule compounds described herein, in conjunction with the iREMS sequence, initiate the assembly of a splicing-competent spliceosome around a weak or incompletely defined exon (i.e., a nascent iExon). Splicing modifier compounds most likely enable a functional U1 snRNP-REMS interaction and, at least, have been shown to increase the affinity of one or more snRNPs and trans factor elements necessary for splicing, including U1, U2, U4, U5 and U6, whereby the interaction between the U1 snRNP, as well as other components of the pre-mRNA splicing machinery, and the nucleotides NNGA (SEQ ID NO: 3863) of the REMS are enhanced. In fact, we have discovered that the interaction of the U1 snRNP, the iREMS and the small molecule splicing modifier compounds described herein serve to define nascent exons by increasing the binding affinity of the pre-mRNA splicing machinery to the iREMS sequence, stabilizing U1 binding with the iREMS sequence, activating a 3′ splice site and a branch point upstream from the iREMS and recruiting U2 snRNP and other trans-acting splicing factors such as U2AF (U2AF65 and U2AF35) and SF3A (SF3A1, SF3A2 and SF3A3) to the upstream branch point and 3′ splice site. The branch point and 3′splice site may or may not be fully occupied in the absence of the compound but have been shown to become occupied after the compound has enabled the formation of a functional U1 snRNP-REMS complex. We have elaborated on the interaction of these key splicing machinery elements, showing that, in the presence of small molecule splicing modifier compounds such as, but certainly not limited to, those described herein, the mechanism of intronic spliceosome assembly can be mediated by iREMS interaction with such compounds, such that the intronic REMS sequence functions as a U1 snRNP binding site, resulting in intronic nucleotides spliced in the mature RNA transcript as an intronic exon.

[0007] In FIG. 1A, the intronic REMS is located in Intron 1 downstream from an Exon 1 5′ splice site (i.e., a 5′ splice site at the 3′ end of Exon 1), a first branch point (BP) sequence and a first 3′ splice site sequence and upstream from a second branch point sequence and a second 3′ splice site sequence of Exon 2 in an RNA transcript (i.e., the precursor mRNA). In the presence of a small molecule splicing modifier compound described herein the intronic REMS functions as a 5′ splice site, whereby the nucleotides between the Exon 1 5′ splice site and the first 3′ splice site are removed to form a splice junction between Exon 1 and a nascent intronic exon and the nucleotides between the intronic REMS and the second 3′ splice site sequence are removed to form a splice junction between iExon 1a and Exon 2, and allowing Exon 2 and the portion of the intron comprising nucleotides from the first 3′ splice site up to and including NNGA (SEQ ID NO: 3863) of the intronic REMS to be joined, thus introducing an intron-derived iExon 1a, generating a non-wildtype mRNA. In certain embodiments of FIG. 1A, one or more elements necessary to form a splice junction may be present endogenously or introduced, wherein the one or more elements are selected from the group consisting of the first branch point, the first 3′ splice site, the intronic REMS, the second branch point and the second 3′ splice site. While illustrated for Intron 1 here, this concept is generally applicable to any other intron in a pre-mRNA transcript.

[0008] In FIG. 1B, the intronic REMS is located in an intron of an RNA transcript downstream from an Exon 1 5′ splice site (i.e., a 5′ splice site at the 3′ end of Exon 1) and upstream from an Intron 1 branch point sequence and a 3′ splice site sequence of Exon 2 (i.e., a 3′ splice site at the 5′ end of Exon 2). In the presence of a small molecule splicing modifier compound described herein, the nucleotides between the Exon 1 5′ splice site and the intronic REMS are retained and those between the intronic REMS and the Intron 1 3′ splice site sequence (except the NNGA (SEQ ID NO: 3863) nucleotides of the intronic REMS) are removed, allowing Exon 1 and the portion of the intron comprising nucleotides from those adjacent to the Exon 1 5′ splice site up to and including NNGA (SEQ ID NO: 3863) of the intronic REMS and the Exon 2 nucleotides to be joined. The scope of the invention described herein is merely illustrated in this configuration for Exon 1 but is generally applicable to any other nascent iExon in an intronic sequence. The elements necessary to induce splicing of an iExon may be present in any configuration capable of recognition by the splicing machinery as an “exon.” Accordingly, in the presence of a splicing modifier compound, the spliceosome recognizes the elements as exonic boundaries for removal of intervening intronic nucleotides between those boundaries. The configuration in this instance results in an iExon spliced between at least one upstream exon and one downstream exon of the same pre-mRNA transcript.

[0009] In FIG. 1C, the intronic REMS is located in Intron 2 downstream from an Exon 2 5′ splice site (i.e., a 5′ splice site at the 3′ end of Exon 2) and upstream from an Intron 2 branch point sequence and a 3′ splice site sequence of Exon 3 (i.e., a 3′ splice site at the 5′ end of Exon 3) in an RNA transcript. In the presence of a small molecule splicing modifier compound described herein, the nucleotides between the intronic REMS and the Exon 3 3′ splice site sequence are removed, allowing Exon 3 and the portion of the intron comprising nucleotides from those adjacent to the Exon 2 5′ splice site up to and including NNGA (SEQ ID NO: 3863) of the intronic REMS to be joined. In this example, the endogenous splicing reaction between Exon 1 and Exon 2 is unaffected by the presence of a compound described herein, resulting in the complete removal of Intron 1. While illustrated for Exon 2 here, this concept is generally applicable to any other internal nascent intronic exon, i.e., an exon that is located between at least one upstream exon and one downstream exon of the same pre-mRNA transcript.

[0010] As used herein, an “exon 5′ splice site”, a “5′ splice site of an exon” or the like refers to a 5′ splice site at the 3′ end of the exon, while an “exon 3′ splice site”, a “3′ splice site of an exon” or the like refers to a 3′ splice site at the 5′ end of the exon.

[0011] In the presence of a small molecule splicing modifier compound described herein, the iREMS nucleotides retained in the formation of an iExon are selected from the group consisting of ANGA (SEQ ID NO: 5), CNGA (SEQ ID NO: 11), GNGA (SEQ ID NO: 17), UNGA (SEQ ID NO: 23), NAGA (SEQ ID NO: 6), NCGA (SEQ ID NO: 12), NGGA (SEQ ID NO: 18), NUGA (SEQ ID NO: 24), AAGA (SEQ ID NO: 7), ACGA (SEQ ID NO: 13), AGGA (SEQ ID NO: 19), AUGA (SEQ ID NO: 25), CAGA (SEQ ID NO: 8), CCGA (SEQ ID NO: 14), CGGA (SEQ ID NO: 20), CUGA (SEQ ID NO: 26), GAGA (SEQ ID NO: 9), GCGA (SEQ ID NO: 15), GGGA (SEQ ID NO: 21), GUGA (SEQ ID NO: 27), UAGA (SEQ ID NO: 10), UCGA (SEQ ID NO: 16), UGGA (SEQ ID NO: 22) and UUGA (SEQ ID NO: 28). The formation of an iExon may result in an RNA transcript having a non-functional open reading frame due to the inclusion of a frameshift, premature stop codon or internal deletions within the open reading frame. In other embodiments, the inclusion of an iExon may result in the mature mRNA having a functional open reading frame, producing a novel protein which may or may not be functional. RNA transcripts having a non-functional open reading frame due to the inclusion of a frameshift, premature stop codon or internal deletions within the open reading frame can be substrates for nonsense-mediated decay and thus have low abundance. Any intronic REMS-mediated alternative splicing modified RNA transcripts may also have altered stability, altered intracellular transport, altered 3′ end formation efficiency and altered translation efficiency.

[0012] Accordingly, in one aspect, provided herein are methods for modulating the amount of RNA transcripts produced from precursor RNA containing an endogenous or non-endogenous intronic REMS. In another aspect, provided herein are artificial gene constructs comprising an endogenous or non-endogenous intronic REMS, which may be used in the context of, e.g., gene therapy or reporter assays. In another aspect, provided herein are methods for altering endogenous genes so that they contain an intronic REMS or an additional intronic REMS.

[0013] In another aspect, provided herein are methods for modulating the amount of one or more RNA transcripts (e.g., mRNA transcripts) or proteins thereof expressed as the product of one or more genes, wherein precursor RNA transcripts transcribed by the one or more genes comprise an intronic REMS, the methods comprising contacting a cell with a compound of Formula

[chemical structure]

or a form thereof, wherein w₁, w₂, w₃, w₄, w₅, w₆ and w₇ are as defined herein. In one embodiment, provided herein is a method for modulating the amount of an RNA transcript produced from precursor RNA containing an intronic recognition element for splicing modifier (REMS), the method comprising contacting a cell containing the precursor RNA with a compound of Formula (I) or a form thereof, wherein the intronic REMS comprises the sequence NNGAgurngn (SEQ ID NO: 1), wherein r is adenine or guanine and n or N is any nucleotide, wherein the precursor RNA is a gene in Table 1. In certain embodiments, the precursor RNA is a gene in Table 7. In another embodiment, provided herein is a method for modulating the amount of an RNA transcript produced from precursor RNA containing an intronic recognition element for splicing modifier (REMS), the method comprising contacting the precursor RNA with a compound of Formula (I) or a form thereof, wherein the intronic REMS comprises the sequence NNGAgurngn (SEQ ID NO: 1), wherein r is adenine or guanine and n or N is any nucleotide, wherein the precursor RNA is a gene in Table 1. In some embodiments, the intronic REMS comprises the sequence NNGAguragu (SEQ ID NO: 3862) at the RNA level, wherein r is adenine or guanine and N is any nucleotide. In certain embodiments, the intronic REMS comprises a sequence selected from the group consisting of ANGAgurngn (SEQ ID NO: 29), CNGAgurngn (SEQ ID NO: 35), GNGAgurngn (SEQ ID NO: 41), UNGAgurngn (SEQ ID NO: 47), NAGAgurngn (SEQ ID NO: 30), NCGAgurngn (SEQ ID NO: 36), NGGAgurngn (SEQ ID NO: 42), NUGAgurngn (SEQ ID NO: 48), AAGAgurngn (SEQ ID NO: 31), ACGAgurngn (SEQ ID NO: 37), AGGAgurngn (SEQ ID NO: 43), AUGAgurngn (SEQ ID NO: 49), CAGAgurngn (SEQ ID NO: 32), CCGAgurngn (SEQ ID NO: 38), CGGAgumgn (SEQ ID NO: 44), CUGAgurngn (SEQ ID NO: 50), GAGAgurngn (SEQ ID NO: 33), GCGAgurngn (SEQ ID NO: 39), GGGAgurngn (SEQ ID NO: 45), GUGAgurngn (SEQ ID NO: 51), UAGAgurngn (SEQ ID NO: 34), UCGAgurngn (SEQ ID NO: 40), UGGAgurngn (SEQ ID NO: 46) and UUGAgurngn (SEQ ID NO: 52), wherein r is adenine or guanine and n or N is any nucleotide. In some embodiments, the intronic REMS comprises a sequence selected from the group consisting of ANGAguragu (SEQ ID NO: 437), CNGAguragu (SEQ ID NO: 443), GNGAguragu (SEQ ID NO: 449), UNGAguragu (SEQ ID NO: 455), NAGAguragu (SEQ ID NO: 438), NCGAguragu (SEQ ID NO: 444), NGGAguragu (SEQ ID NO: 450), NUGAguragu (SEQ ID NO: 456), AAGAguragu (SEQ ID NO: 439), ACGAguragu (SEQ ID NO: 445), AGGAguragu (SEQ ID NO: 451), AUGAguragu (SEQ ID NO: 457), CAGAguragu (SEQ ID NO: 440), CCGAguragu (SEQ ID NO: 446), CGGAguragu (SEQ ID NO: 452), CUGAguragu (SEQ ID NO: 458), GAGAguragu (SEQ ID NO: 441), GCGAguragu (SEQ ID NO: 447), GGGAguragu (SEQ ID NO: 453), GUGAguragu (SEQ ID NO: 459), UAGAguragu (SEQ ID NO: 442), UCGAguragu (SEQ ID NO: 448), UGGAguragu (SEQ ID NO: 454) and UUGAguragu (SEQ ID NO: 460) at the RNA level, wherein r is adenine or guanine, and N is any nucleotide. In one or more embodiments provided herein, N is adenine or guanine.

[0014] In a specific embodiment, the intronic REMS referred to in a method or artificial gene construct described herein comprises, at the RNA level, a sequence presented in the following table (wherein r is adenine or guanine, and n or N is any nucleotide):

TABLE 13
Intronic REMS RNA sequence (wherein r is adenine or guanine, and n or N
is any nucleotide)

| SEQ ID | | SEQ ID | | SEQ ID | | SEQ ID | |
|---|---|---|---|---|---|---|---|
| NO. | Sequence | NO. | Sequence | NO. | Sequence | NO. | Sequence |
| 29 | ANGAgurngn | 35 | CNGAgurngn | 41 | GNGAgurngn | 47 | UNGAgurngn |
| 30 | NAGAgurngn | 36 | NCGAgurngn | 42 | NGGAgurngn | 48 | NUGAgurngn |
| 31 | AAGAgurngn | 37 | ACGAgurngn | 43 | AGGAgurngn | 49 | AUGAgurngn |
| 32 | CAGAgurngn | 38 | CCGAgurngn | 44 | CGGAgurngn | 50 | CUGAgurngn |
| 33 | GAGAgurngn | 39 | GCGAgurngn | 45 | GGGAgurngn | 51 | GUGAgurngn |
| 34 | UAGAgurngn | 40 | UCGAgurngn | 46 | UGGAgurngn | 52 | UUGAgurngn |
| 53 | ANGAguragn | 77 | ANGAgurcgn | 101 | ANGAgurggn | 125 | ANGAgurugn |
| 54 | NAGAguragn | 78 | NAGAgurcgn | 102 | NAGAgurggn | 126 | NAGAgurugn |
| 55 | AAGAguragn | 79 | AAGAgurcgn | 103 | AAGAgurggn | 127 | AAGAgurugn |
| 56 | CAGAguragn | 80 | CAGAgurcgn | 104 | CAGAgurggn | 128 | CAGAgurugn |
| 57 | GAGAguragn | 81 | GAGAgurcgn | 105 | GAGAgurggn | 129 | GAGAgurugn |
| 58 | UAGAguragn | 82 | UAGAgurcgn | 106 | UAGAgurggn | 130 | UAGAgurugn |
| 59 | CNGAguragn | 83 | CNGAgurcgn | 107 | CNGAgurggn | 131 | CNGAgurugn |
| 60 | NCGAguragn | 84 | NCGAgurcgn | 108 | NCGAgurggn | 132 | NCGAgurugn |
| 61 | ACGAguragn | 85 | ACGAgurcgn | 109 | ACGAgurggn | 133 | ACGAgurugn |
| 62 | CCGAguragn | 86 | CCGAgurcgn | 110 | CCGAgurggn | 134 | CCGAgurugn |
| 63 | GCGAguragn | 87 | GCGAgurcgn | 111 | GCGAgurggn | 135 | GCGAgurugn |
| 64 | UCGAguragn | 88 | UCGAgurcgn | 112 | UCGAgurggn | 136 | UCGAgurugn |
| 65 | GNGAguragn | 89 | GNGAgurcgn | 113 | GNGAgurggn | 137 | GNGAgurugn |
| 66 | NGGAguragn | 90 | NGGAgurcgn | 114 | NGGAgurggn | 138 | NGGAgurugn |
| 67 | AGGAguragn | 91 | AGGAgurcgn | 115 | AGGAgurggn | 139 | AGGAgurugn |
| 68 | CGGAguragn | 92 | CGGAgurcgn | 116 | CGGAgurggn | 140 | CGGAgurugn |
| 69 | GGGAguragn | 93 | GGGAgurcgn | 117 | GGGAgurggn | 141 | GGGAgurugn |
| 70 | UGGAguragn | 94 | UGGAgurcgn | 118 | UGGAgurggn | 142 | UGGAgurugn |
| 71 | UNGAguragn | 95 | UNGAgurcgn | 119 | UNGAgurggn | 143 | UNGAgurugn |
| 72 | NUGAguragn | 96 | NUGAgurcgn | 120 | NUGAgurggn | 144 | NUGAgurugn |
| 73 | AUGAguragn | 97 | AUGAgurcgn | 121 | AUGAgurggn | 145 | AUGAgurugn |
| 74 | CUGAguragn | 98 | CUGAgurcgn | 122 | CUGAgurggn | 146 | CUGAgurugn |
| 75 | GUGAguragn | 99 | GUGAgurcgn | \|23 | GUGAgurggn | 147 | GUGAgurugn |
| 76 | UUGAguragn | 100 | UUGAgurcgn | 124 | UUGAgurggn | 148 | UUGAgurugn |
| 149 | ANGAguraga | 173 | ANGAgurcga | 197 | ANGAgurgga | 221 | ANGAguruga |
| 150 | NAGAguraga | 174 | NAGAgurcga | 198 | NAGAgurgga | 222 | NAGAguruga |
| 151 | AAGAguraga | 175 | AAGAgurcga | 199 | AAGAgurgga | 223 | AAGAguruga |
| 152 | CAGAguraga | 176 | CAGAgurcga | 200 | CAGAgurgga | 224 | CAGAguruga |
| 153 | GAGAguraga | 177 | GAGAgurcga | 201 | GAGAgurgga | 225 | GAGAguruga |
| 154 | UAGAguraga | 178 | UAGAgurcga | 202 | UAGAgurgga | 226 | UAGAguruga |
| 155 | CNGAguraga | 179 | CNGAgurcga | 203 | CNGAgurgga | 227 | CNGAguruga |
| 156 | NCGAguraga | 180 | NCGAgurcga | 204 | NCGAgurgga | 228 | NCGAguruga |
| 157 | ACGAguraga | 181 | ACGAgurcga | 205 | ACGAgurgga | 229 | ACGAguruga |
| 158 | CCGAguraga | 182 | CCGAgurcga | 206 | CCGAgurgga | 230 | CCGAguruga |
| 159 | GCGAguraga | 183 | GCGAgurcga | 207 | GCGAgurgga | 231 | GCGAguruga |
| 160 | UCGAguraga | 184 | UCGAgurcga | 208 | UCGAgurgga | 232 | UCGAguruga |
| 161 | GNGAguraga | 185 | GNGAgurcga | 209 | GNGAgurgga | 233 | GNGAguruga |
| 162 | NGGAguraga | 186 | NGGAgurcga | 210 | NGGAgurgga | 234 | NGGAguruga |
| 163 | AGGAguraga | 187 | AGGAgurcga | 211 | AGGAgurgga | 235 | AGGAguruga |
| 164 | CGGAguraga | 188 | CGGAgurcga | 212 | CGGAgurgga | 236 | CGGAguruga |
| 165 | GGGAguraga | 189 | GGGAgurcga | 213 | GGGAgurgga | 237 | GGGAguruga |
| 166 | UGGAguraga | 190 | UGGAgurcga | 214 | UGGAgurgga | 238 | UGGAguruga |
| 167 | UNGAguraga | 191 | UNGAgurcga | 215 | UNGAgurgga | 239 | UNGAguruga |
| 168 | NUGAguraga | 192 | NUGAgurcga | 216 | NUGAgurgga | 240 | NUGAguruga |
| 169 | AUGAguraga | 193 | AUGAgurcga | 217 | AUGAgurgga | 241 | AUGAguruga |
| 170 | CUGAguraga | 194 | CUGAgurcga | 218 | CUGAgurgga | 242 | CUGAguruga |
| 171 | GUGAguraga | 195 | GUGAgurcga | 219 | GUGAgurgga | 243 | GUGAguruga |
| 172 | UUGAguraga | 196 | UUGAgurcga | 220 | UUGAgurgga | 244 | UUGAguruga |
| 245 | ANGAguragc | 269 | ANGAgurcgc | 293 | ANGAgurggc | 317 | ANGAgurugc |
| 246 | NAGAguragc | 270 | NAGAgurcgc | 294 | NAGAgurggc | 318 | NAGAgurugc |
| 247 | AAGAguragc | 271 | AAGAgurcgc | 295 | AAGAgurggo | 319 | AAGAgurugc |
| 248 | CAGAguragc | 272 | CAGAgurcgc | 296 | CAGAgurggc | 320 | CAGAgurugc |
| 249 | GAGAguragc | 273 | GAGAgurcgc | 297 | GAGAgurggc | 321 | GAGAgurugc |
| 250 | UAGAguragc | 274 | UAGAgurcgc | 298 | UAGAgurggc | 322 | UAGAgurugc |
| 251 | CNGAguragc | 275 | CNGAgurcgc | 299 | CNGAgurggc | 323 | CNGAgurugc |
| 252 | NCGAgurago | 276 | NCGAgurcgc | 300 | NCGAgurggc | 324 | NCGAgurugc |
| 253 | ACGAguragc | 277 | ACGAgurcgc | 301 | ACGAgurggc | 325 | ACGAgurugc |
| 254 | CCGAguragc | 278 | CCGAgurcgc | 302 | CCGAgurggc | 326 | CCGAgurugc |
| 255 | GCGAguragc | 279 | GCGAgurcgc | 303 | GCGAgurggc | 327 | GCGAgurugc |
| 256 | UCGAguragc | 280 | UCGAgurcgc | 304 | UCGAgurggc | 328 | UCGAgurugc |
| 257 | GNGAguragc | 281 | GNGAgurcgc | 305 | GNGAgurggc | 329 | GNGAgurugc |
| 258 | NGGAguragc | 282 | NGGAgurcgc | 306 | NGGAgurggc | 330 | NGGAgurugc |
| 259 | AGGAguragc | 283 | AGGAgurcgc | 307 | AGGAgurggc | 331 | AGGAgurugc |
| 260 | CGGAguragc | 284 | CGGAgurcgc | 308 | CGGAgurggc | 332 | CGGAgurugc |
| 261 | GGGAguragc | 285 | GGGAgurcgc | 309 | GGGAgurggc | 333 | GGGAgurugc |
| 262 | UGGAguragc | 286 | UGGAgurcgc | 310 | UGGAgurggc | 334 | UGGAgurugc |
| 263 | UNGAguragc | 287 | UNGAgurcgc | 311 | UNGAgurggc | 335 | UNGAgurugc |
| 264 | NUGAguragc | 288 | NUGAgurcgc | 312 | NUGAgurggc | 336 | NUGAgurugc |
| 265 | AUGAguragc | 289 | AUGAgurcgc | 313 | AUGAgurggc | 337 | AUGAgurugc |
| 266 | CUGAgurago | 290 | CUGAgurcgc | 314 | CUGAgurggc | 338 | CUGAgurugc |
| 267 | GUGAguragc | 291 | GUGAgurcgc | 315 | GUGAgurggc | 339 | GUGAgurugc |
| 268 | UUGAguragc | 292 | UUGAgurcgc | 316 | UUGAgurggc | 340 | UUGAgurugc |
| 341 | ANGAguragg | 365 | ANGAgurcgg | 389 | ANGAgurggg | 413 | ANGAgurugg |
| 342 | NAGAguragg | 366 | NAGAgurcgg | 390 | NAGAgurggg | 414 | NAGAgurugg |
| 343 | AAGAguragg | 367 | AAGAgurcgg | 391 | AAGAgurggg | 415 | AAGAgurugg |
| 344 | CAGAguragg | 368 | CAGAgurcgg | 392 | CAGAgurggg | 416 | CAGAgurugg |
| 345 | GAGAguragg | 369 | GAGAgurcgg | 393 | GAGAgurggg | 417 | GAGAgurugg |
| 346 | UAGAguragg | 370 | UAGAgurcgg | 394 | UAGAgurggg | 418 | UAGAgurugg |
| 347 | CNGAguragg | 371 | CNGAgurcgg | 395 | CNGAgurggg | 419 | CNGAgurugg |
| 348 | NCGAguragg | 372 | NCGAgurcgg | 396 | NCGAgurggg | 420 | NCGAgurugg |
| 349 | ACGAguragg | 373 | ACGAgurcgg | 397 | ACGAgurggg | 421 | ACGAgurugg |
| 350 | CCGAguragg | 374 | CCGAgurcgg | 398 | CCGAgurggg | 422 | CCGAgurugg |
| 351 | GCGAguragg | 375 | GCGAgurcgg | 399 | GCGAgurggg | 423 | GCGAgurugg |
| 352 | UCGAguragg | 376 | UCGAgurcgg | 400 | UCGAgurggg | 424 | UCGAgurugg |
| 353 | GNGAguragg | 377 | GNGAgurcgg | 401 | GNGAgurggg | 425 | GNGAgurugg |
| 354 | NGGAguragg | 378 | NGGAgurcgg | 402 | NGGAgurggg | 426 | NGGAgurugg |
| 355 | AGGAguragg | 379 | AGGAgurcgg | 403 | AGGAgurggg | 427 | AGGAgurugg |
| 356 | CGGAguragg | 380 | CGGAgurcgg | 404 | CGGAgurggg | 428 | CGGAgurugg |
| 357 | GGGAguragg | 381 | GGGAgurcgg | 405 | GGGAgurggg | 429 | GGGAgurugg |
| 358 | UGGAguragg | 382 | UGGAgurcgg | 406 | UGGAgurggg | 430 | UGGAgurugg |
| 359 | UNGAguragg | 383 | UNGAgurcgg | 407 | UNGAgurggg | 431 | UNGAgurugg |
| 360 | NUGAguragg | 384 | NUGAgurcgg | 408 | NUGAgurggg | 432 | NUGAgurugg |
| 361 | AUGAguragg | 385 | AUGAgurcgg | 409 | AUGAgurggg | 433 | AUGAgurugg |
| 362 | CUGAguragg | 386 | CUGAgurcgg | 410 | CUGAgurggg | 434 | CUGAgurugg |
| 363 | GUGAguragg | 387 | GUGAgurcgg | 411 | GUGAgurggg | 435 | GUGAgurugg |
| 364 | UUGAguragg | 388 | UUGAgurcgg | 412 | UUGAgurggg | 436 | UUGAgurugg |
| 437 | ANGAguragu | 461 | ANGAgurcgu | 485 | ANGAgurggu | 509 | ANGAgurugu |
| 438 | NAGAguragu | 462 | NAGAgurcgu | 486 | NAGAgurggu | 510 | NAGAgurugu |
| 439 | AAGAguragu | 463 | AAGAgurcgu | 487 | AAGAgurggu | 511 | AAGAgurugu |
| 440 | CAGAguragu | 464 | CAGAgurcgu | 488 | CAGAgurggu | 512 | CAGAgurugu |
| 441 | GAGAguragu | 465 | GAGAgurcgu | 489 | GAGAgurggu | 513 | GAGAgurugu |
| 442 | UAGAguragu | 466 | UAGAgurcgu | 490 | UAGAgurggu | 514 | UAGAgurugu |
| 443 | CNGAguragu | 467 | CNGAgurcgu | 491 | CNGAgurggu | 515 | CNGAgurugu |
| 444 | NCGAguragu | 468 | NCGAgurcgu | 492 | NCGAgurggu | 516 | NCGAgurugu |
| 445 | ACGAguragu | 469 | ACGAgurcgu | 493 | ACGAgurggu | 517 | ACGAgurugu |
| 446 | CCGAguragu | 470 | CCGAgurcgu | 494 | CCGAgurggu | 518 | CCGAgurugu |
| 447 | GCGAguragu | 471 | GCGAgurcgu | 495 | GCGAgurggu | 519 | GCGAgurugu |
| 448 | UCGAguragu | 472 | UCGAgurcgu | 496 | UCGAgurggu | 520 | UCGAgurugu |
| 449 | GNGAguragu | 473 | GNGAgurcgu | 497 | GNGAgurggu | 521 | GNGAgurugu |
| 450 | NGGAguragu | 474 | NGGAgurcgu | 498 | NGGAgurggu | 522 | NGGAgurugu |
| 451 | AGGAguragu | 475 | AGGAgurcgu | 499 | AGGAgurggu | 523 | AGGAgurugu |
| 452 | CGGAguragu | 476 | CGGAgurcgu | 500 | CGGAgurggu | 524 | CGGAgurugu |
| 453 | GGGAguragu | 477 | GGGAgurcgu | 501 | GGGAgurggu | 525 | GGGAgurugu |
| 454 | UGGAguragu | 478 | UGGAgurcgu | 502 | UGGAgurggu | 526 | UGGAgurugu |
| 455 | UNGAguragu | 479 | UNGAgurcgu | 503 | UNGAgurggu | 527 | UNGAgurugu |
| 456 | NUGAguragu | 480 | NUGAgurcgu | 504 | NUGAgurggu | 528 | NUGAgurugu |
| 457 | AUGAguragu | 481 | AUGAgurcgu | 505 | AUGAgurggu | 529 | AUGAgurugu |
| 458 | CUGAguragu | 482 | CUGAgurcgu | 506 | CUGAgurggu | 530 | CUGAgurugu |
| 459 | GUGAguragu | 483 | GUGAgurcgu | 507 | GUGAgurggu | 531 | GUGAgurugu |
| 460 | UUGAguragu | 484 | UUGAgurcgu | 508 | UUGAgurggu | 532 | UUGAgurugu |
| 533 | ANGAgurnga | 557 | ANGAgurngc | 581 | ANGAgurngg | 605 | ANGAgurngu |
| 534 | NAGAgurnga | 558 | NAGAgurngc | 582 | NAGAgurngg | 606 | NAGAgurngu |
| 535 | AAGAgurnga | 559 | AAGAgurngc | 583 | AAGAgurngg | 607 | AAGAgurngu |
| 536 | CAGAgurnga | 560 | CAGAgurngc | 584 | CAGAgurngg | 608 | CAGAgurngu |
| 537 | GAGAgurnga | 561 | GAGAgurngc | 585 | GAGAgurngg | 609 | GAGAgurngu |
| 538 | UAGAgurnga | 562 | UAGAgurngc | 586 | UAGAgurngg | 610 | UAGAgurngu |
| 539 | CNGAgurnga | 563 | CNGAgurngc | 587 | CNGAgurngg | 611 | CNGAgurngu |
| 540 | NCGAgurnga | 564 | NCGAgurngc | 588 | NCGAgurngg | 612 | NCGAgurngu |
| 541 | ACGAgurnga | 565 | ACGAgurngc | 589 | ACGAgurngg | 613 | ACGAgurngu |
| 542 | CCGAgurnga | 566 | CCGAgurngc | 590 | CCGAgurngg | 614 | CCGAgurngu |
| 543 | GCGAgurnga | 567 | GCGAgurngc | 591 | GCGAgurngg | 615 | GCGAgurngu |
| 544 | UCGAgurnga | 568 | UCGAgurngc | 592 | UCGAgurngg | 616 | UCGAgurngu |
| 545 | GNGAgurnga | 569 | GNGAgurngc | 593 | GNGAgurngg | 617 | GNGAgurngu |
| 546 | NGGAgurnga | 570 | NGGAgurngc | 594 | NGGAgurngg | 618 | NGGAgurngu |
| 547 | AGGAgurnga | 571 | AGGAgurngo | 595 | AGGAgurngg | 619 | AGGAgurngu |
| 548 | CGGAgurnga | 572 | CGGAgurngc | 596 | CGGAgurngg | 620 | CGGAgurngu |
| 549 | GGGAgurnga | 573 | GGGAgurngc | 597 | GGGAgurngg | 621 | GGGAgurngu |
| 550 | UGGAgurnga | 574 | UGGAgurngc | 598 | UGGAgurngg | 622 | UGGAgurngu |
| 551 | UNGAgurnga | 575 | UNGAgurngc | 599 | UNGAgurngg | 623 | UNGAgurngu |
| 552 | NUGAgurnga | 576 | NUGAgurngc | 600 | NUGAgurngg | 624 | NUGAgurngu |
| 553 | AUGAgurnga | 577 | AUGAgurngc | 601 | AUGAgurngg | 625 | AUGAgurngu |
| 554 | CUGAgurnga | 578 | CUGAgurngc | 602 | CUGAgurngg | 626 | CUGAgurngu |
| 555 | GUGAgurnga | 579 | GUGAgurngc | 603 | GUGAgurngg | 627 | GUGAgurngu |
| 556 | UUGAgurnga | 580 | UUGAgurngc | 604 | UUGAgurngg | 628 | UUGAgurngu |
| 629 | ANGAguangn | 653 | ANGAguaagr | 677 | ANGAguacgn | 701 | ANGAguaggn |
| 630 | NAGAguangn | 654 | NAGAguaagn | 678 | NAGAguacgn | 702 | NAGAguaggn |
| 631 | AAGAguangn | 655 | AAGAguaagn | 679 | AAGAguacgn | 703 | AAGAguaggn |
| 632 | CAGAguangn | 656 | CAGAguaagn | 680 | CAGAguacgn | 704 | CAGAguaggn |
| 633 | GAGAguangn | 657 | GAGAguaagn | 681 | GAGAguacgn | 705 | GAGAguaggn |
| 634 | UAGAguangn | 658 | UAGAguaagn | 682 | UAGAguacgn | 706 | UAGAguaggn |
| 635 | CNGAguangn | 659 | CNGAguaagn | 683 | CNGAguacgn | 707 | CNGAguaggn |
| 636 | NCGAguangn | 660 | NCGAguaagn | 684 | NCGAguacgn | 708 | NCGAguaggn |
| 637 | ACGAguangn | 661 | ACGAguaagn | 685 | ACGAguacgn | 709 | ACGAguaggn |
| 638 | CCGAguangn | 662 | CCGAguaagn | 686 | CCGAguacgn | 710 | CCGAguaggn |
| 639 | GCGAguangn | 663 | GCGAguaagn | 687 | GCGAguacgn | 711 | GCGAguaggn |
| 640 | UCGAguangn | 664 | UCGAguaagn | 688 | UCGAguacgn | 712 | UCGAguaggn |
| 641 | GNGAguangn | 665 | GNGAguaagn | 689 | GNGAguacgn | 713 | GNGAguaggn |
| 642 | NGGAguangn | 666 | NGGAguaagn | 690 | NGGAguacgn | 714 | NGGAguaggn |
| 643 | AGGAguangn | 667 | AGGAguaagn | 691 | AGGAguacgn | 715 | AGGAguaggn |
| 644 | CGGAguangn | 668 | CGGAguaagn | 692 | CGGAguacgn | 716 | CGGAguaggn |
| 645 | GGGAguangn | 669 | GGGAguaagn | 693 | GGGAguacgn | 717 | GGGAguaggn |
| 646 | UGGAguangn | 670 | UGGAguaagn | 694 | UGGAguacgn | 718 | UGGAguaggn |
| 647 | UNGAguangn | 671 | UNGAguaagn | 695 | UNGAguacgn | 719 | UNGAguaggn |
| 648 | NUGAguangn | 672 | NUGAguaagn | 696 | NUGAguacgn | 720 | NUGAguaggn |
| 649 | AUGAguangn | 673 | AUGAguaagn | 697 | AUGAguacgn | 721 | AUGAguaggn |
| 650 | CUGAguangn | 674 | CUGAguaagn | 698 | CUGAguacgn | 722 | CUGAguaggn |
| 651 | GUGAguangn | 675 | GUGAguaagn | 699 | GUGAguacgn | 723 | GUGAguaggn |
| 652 | UUGAguangn | 676 | UUGAguaagn | 700 | UUGAguacgn | 724 | UUGAguaggn |
| 725 | ANGAguaugn | 749 | ANGAguaaga | 773 | ANGAguacga | 797 | ANGAguagga |
| 726 | NAGAguaugn | 750 | NAGAguaaga | 774 | NAGAguacga | 798 | NAGAguagga |
| 727 | AAGAguaugn | 751 | AAGAguaaga | 775 | AAGAguacga | 799 | AAGAguagga |
| 728 | CAGAguaugn | 752 | CAGAguaaga | 776 | CAGAguacga | 800 | CAGAguagga |
| 729 | GAGAguaugn | 753 | GAGAguaaga | 777 | GAGAguacga | 801 | GAGAguagga |
| 730 | UAGAguaugn | 754 | UAGAguaaga | 778 | UAGAguacga | 802 | UAGAguagga |
| 731 | CNGAguaugn | 755 | CNGAguaaga | 779 | CNGAguacga | 803 | CNGAguagga |
| 732 | NCGAguaugn | 756 | NCGAguaaga | 780 | NCGAguacga | 804 | NCGAguagga |
| 733 | ACGAguaugn | 757 | ACGAguaaga | 781 | ACGAguacga | 805 | ACGAguagga |
| 734 | CCGAguaugn | 758 | CCGAguaaga | 782 | CCGAguacga | 806 | CCGAguagga |
| 735 | GCGAguaugn | 759 | GCGAguaaga | 783 | GCGAguacga | 807 | GCGAguagga |
| 736 | UCGAguaugr | 760 | UCGAguaaga | 784 | UCGAguacga | 808 | UCGAguagga |
| 737 | GNGAguaugn | 761 | GNGAguaaga | 785 | GNGAguacga | 809 | GNGAguagga |
| 738 | NGGAguaugn | 762 | NGGAguaaga | 786 | NGGAguacga | 810 | NGGAguagga |
| 739 | AGGAguaugn | 763 | AGGAguaaga | 787 | AGGAguacga | 811 | AGGAguagga |
| 740 | CGGAguaugn | 764 | CGGAguaaga | 788 | CGGAguacga | 812 | CGGAguagga |
| 741 | GGGAguaugn | 765 | GGGAguaaga | 789 | GGGAguacga | 813 | GGGAguagga |
| 742 | UGGAguaugn | 766 | UGGAguaaga | 790 | UGGAguacga | 814 | UGGAguagga |
| 743 | UNGAguaugn | 767 | UNGAguaaga | 791 | UNGAguacga | 815 | UNGAguagga |
| 744 | NUGAguaugn | 768 | NUGAguaaga | 792 | NUGAguacga | 816 | NUGAguagga |
| 745 | AUGAguaugn | 769 | AUGAguaaga | 793 | AUGAguacga | 817 | AUGAguagga |
| 746 | CUGAguaugn | 770 | CUGAguaaga | 794 | CUGAguacga | 818 | CUGAguagga |
| 747 | GUGAguaugn | 771 | GUGAguaaga | 795 | GUGAguacga | 819 | GUGAguagga |
| 748 | UUGAguaugn | 772 | UUGAguaaga | 796 | UUGAguacga | 820 | UUGAguagga |
| 821 | ANGAguauga | 845 | ANGAguaagc | 869 | ANGAguacgc | 893 | ANGAguaggc |
| 822 | NAGAguauga | 846 | NAGAguaagc | 870 | NAGAguacgc | 894 | NAGAguaggc |
| 823 | AAGAguauga | 847 | AAGAguaagc | 871 | AAGAguacgc | 895 | AAGAguaggc |
| 824 | CAGAguauga | 848 | CAGAguaagc | 872 | CAGAguacgc | 896 | CAGAguaggc |
| 825 | GAGAguauga | 849 | GAGAguaagc | 873 | GAGAguacgc | 897 | GAGAguaggc |
| 826 | UAGAguauga | 850 | UAGAguaagc | 874 | UAGAguacgc | 898 | UAGAguaggc |
| 827 | CNGAguauga | 851 | CNGAguaagc | 875 | CNGAguacgc | 899 | CNGAguaggc |
| 828 | NCGAguauga | 852 | NCGAguaagc | 876 | NCGAguacgc | 900 | NCGAguaggc |
| 829 | ACGAguauga | 853 | ACGAguaagc | 877 | ACGAguacgc | 901 | ACGAguaggc |
| 830 | CCGAguauga | 854 | CCGAguaagc | 878 | CCGAguacgc | 902 | CCGAguaggc |
| 831 | GCGAguauga | 855 | GCGAguaagc | 879 | GCGAguacgc | 903 | GCGAguaggc |
| 832 | UCGAguauga | 856 | UCGAguaagc | 880 | UCGAguacgc | 904 | UCGAguaggc |
| 833 | GNGAguauga | 857 | GNGAguaagc | 881 | GNGAguacgc | 905 | GNGAguaggc |
| 834 | NGGAguauga | 858 | NGGAguaagc | 882 | NGGAguacgc | 906 | NGGAguaggc |
| 835 | AGGAguauga | 859 | AGGAguaagc | 883 | AGGAguacgc | 907 | AGGAguaggc |
| 836 | CGGAguauga | 860 | CGGAguaagc | 884 | CGGAguacgc | 908 | CGGAguaggc |
| 837 | GGGAguauga | 861 | GGGAguaagc | 885 | GGGAguacgc | 909 | GGGAguaggc |
| 838 | UGGAguauga | 862 | UGGAguaagc | 886 | UGGAguacgc | 910 | UGGAguaggc |
| 839 | UNGAguauga | 863 | UNGAguaagc | 887 | UNGAguacgc | 911 | UNGAguaggc |
| 840 | NUGAguauga | 864 | NUGAguaagc | 888 | NUGAguacgc | 912 | NUGAguaggc |
| 841 | AUGAguauga | 865 | AUGAguaagc | 889 | AUGAguacgc | 913 | AUGAguaggc |
| 842 | CUGAguauga | 866 | CUGAguaagc | 890 | CUGAguacgc | 914 | CUGAguaggc |
| 843 | GUGAguauga | 867 | GUGAguaagc | 891 | GUGAguacgc | 915 | GUGAguaggc |
| 844 | UUGAguauga | 868 | UUGAguaagc | 892 | UUGAguacgc | 916 | UUGAguaggc |
| 917 | ANGAguaugc | 941 | ANGAguaagg | 965 | ANGAguacgg | 989 | ANGAguaggg |
| 918 | NAGAguaugc | 942 | NAGAguaagg | 966 | NAGAguacgg | 990 | NAGAguaggg |
| 919 | AAGAguaugc | 943 | AAGAguaagg | 967 | AAGAguacgg | 991 | AAGAguaggg |
| 920 | CAGAguaugc | 944 | CAGAguaagg | 968 | CAGAguacgg | 992 | CAGAguaggg |
| 921 | GAGAguaugc | 945 | GAGAguaagg | 969 | GAGAguacgg | 993 | GAGAguaggg |
| 922 | UAGAguaugc | 946 | UAGAguaagg | 970 | UAGAguacgg | 994 | UAGAguaggg |
| 923 | CNGAguaugc | 947 | CNGAguaagg | 971 | CNGAguacgg | 995 | CNGAguaggg |
| 924 | NCGAguaugc | 948 | NCGAguaagg | 972 | NCGAguacgg | 996 | NCGAguaggg |
| 925 | ACGAguaugc | 949 | ACGAguaagg | 973 | ACGAguacgg | 997 | ACGAguaggg |
| 926 | CCGAguaugc | 950 | CCGAguaagg | 974 | CCGAguacgg | 998 | CCGAguaggg |
| 927 | GCGAguaugc | 951 | GCGAguaagg | 975 | GCGAguacgg | 999 | GCGAguaggg |
| 928 | UCGAguaugc | 952 | UCGAguaagg | 976 | UCGAguacgg | 1000 | UCGAguaggg |
| 929 | GNGAguaugc | 953 | GNGAguaagg | 977 | GNGAguacgg | 1001 | GNGAguaggg |
| 930 | NGGAguaugc | 954 | NGGAguaagg | 978 | NGGAguacgg | 1002 | NGGAguaggg |
| 931 | AGGAguaugc | 955 | AGGAguaagg | 979 | AGGAguacgg | 1003 | AGGAguaggg |
| 932 | CGGAguaugc | 956 | CGGAguaagg | 980 | CGGAguacgg | 1004 | CGGAguaggg |
| 933 | GGGAguaugc | 957 | GGGAguaagg | 981 | GGGAguacgg | 1005 | GGGAguaggg |
| 934 | UGGAguaugc | 958 | UGGAguaagg | 982 | UGGAguacgg | 1006 | UGGAguaggg |
| 935 | UNGAguaugc | 959 | UNGAguaagg | 983 | UNGAguacgg | 1007 | UNGAguaggg |
| 936 | NUGAguaugc | 960 | NUGAguaagg | 984 | NUGAguacgg | 1008 | NUGAguaggg |
| 937 | AUGAguaugc | 961 | AUGAguaagg | 985 | AUGAguacgg | 1009 | AUGAguaggg |
| 938 | CUGAguaugc | 962 | CUGAguaagg | 986 | CUGAguacgg | 1010 | CUGAguaggg |
| 939 | GUGAguaugc | 963 | GUGAguaagg | 987 | GUGAguacgg | 1011 | GUGAguaggg |
| 940 | UUGAguaugc | 964 | UUGAguaagg | 988 | UUGAguacgg | 1012 | UUGAguaggg |
| 1013 | ANGAguaugg | 1037 | ANGAguaagu | 1061 | ANGAguacgu | 1085 | ANGAguaggu |
| 1014 | NAGAguaugg | 1038 | NAGAguaagu | 1062 | NAGAguacgu | 1086 | NAGAguaggu |
| 1015 | AAGAguaugg | 1039 | AAGAguaagu | 1063 | AAGAguacgu | 1087 | AAGAguaggu |
| 1016 | CAGAguaugg | 1040 | CAGAguaagu | 1064 | CAGAguacgu | 1088 | CAGAguaggu |
| 1017 | GAGAguaugg | 1041 | GAGAguaagu | 1065 | GAGAguacgu | 1089 | GAGAguaggu |
| 1018 | UAGAguaugg | 1042 | UAGAguaagu | 1066 | UAGAguacgu | 1090 | UAGAguaggu |
| 1019 | CNGAguaugg | 1043 | CNGAguaagu | 1067 | CNGAguacgu | 1091 | CNGAguaggu |
| 1020 | NCGAguaugg | 1044 | NCGAguaagu | 1068 | NCGAguacgu | 1092 | NCGAguaggu |
| 1021 | ACGAguaugg | 1045 | ACGAguaagu | 1069 | ACGAguacgu | 1093 | ACGAguaggu |
| 1022 | CCGAguaugg | 1046 | CCGAguaagu | 1070 | CCGAguacgu | 1094 | CCGAguaggu |
| 1023 | GCGAguaugg | 1047 | GCGAguaagu | 1071 | GCGAguacgu | 1095 | GCGAguaggu |
| 1024 | UCGAguaugg | 1048 | UCGAguaagu | 1072 | UCGAguacgu | 1096 | UCGAguaggu |
| 1025 | GNGAguaugg | 1049 | GNGAguaagu | 1073 | GNGAguacgu | 1097 | GNGAguaggu |
| 1026 | NGGAguaugg | 1050 | NGGAguaagu | 1074 | NGGAguacgu | 1098 | NGGAguaggu |
| 1027 | AGGAguaugg | 1051 | AGGAguaagu | 1075 | AGGAguacgu | 1099 | AGGAguaggu |
| 1028 | CGGAguaugg | 1052 | CGGAguaagu | 1076 | CGGAguacgu | 1100 | CGGAguaggu |
| 1029 | GGGAguaugg | 1053 | GGGAguaagu | 1077 | GGGAguacgu | 1101 | GGGAguaggu |
| 1030 | UGGAguaugg | 1054 | UGGAguaagu | 1078 | UGGAguacgu | 1102 | UGGAguaggu |
| 1031 | UNGAguaugg | 1055 | UNGAguaagu | 1079 | UNGAguacgu | 1103 | UNGAguaggu |
| 1032 | NUGAguaugg | 1056 | NUGAguaagu | 1080 | NUGAguacgu | 1104 | NUGAguaggu |
| 1033 | AUGAguaugg | 1057 | AUGAguaagu | 1081 | AUGAguacgu | 1105 | AUGAguaggu |
| 1034 | CUGAguaugg | 1058 | CUGAguaagu | 1082 | CUGAguacgu | 1106 | CUGAguaggu |
| 1035 | GUGAguaugg | 1059 | GUGAguaagu | 1083 | GUGAguacgu | 1107 | GUGAguaggu |
| 1036 | UUGAguaugg | 1060 | UUGAguaagu | 1084 | UUGAguacgu | 1108 | UUGAguaggu |
| 1109 | ANGAguaugu | 1133 | ANGAguanga | 1157 | ANGAguangc | 1181 | ANGAguangg |
| 1110 | NAGAguaugu | 1134 | NAGAguanga | 1158 | NAGAguangc | 1182 | NAGAguangg |
| 1111 | AAGAguaugu | 1135 | AAGAguanga | 1159 | AAGAguangc | 1183 | AAGAguangg |
| 1112 | CAGAguaugu | 1136 | CAGAguanga | 1160 | CAGAguangc | 1184 | CAGAguangg |
| 1113 | GAGAguaugu | 1137 | GAGAguanga | 1161 | GAGAguangc | 1185 | GAGAguangg |
| 1114 | UAGAguaugu | 1138 | UAGAguanga | 1162 | UAGAguangc | 1186 | UAGAguangg |
| 1115 | CNGAguaugu | 1139 | CNGAguanga | 1163 | CNGAguangc | 1187 | CNGAguangg |
| 1116 | NCGAguaugu | 1140 | NCGAguanga | 1164 | NCGAguangc | 1188 | NCGAguangg |
| 1117 | ACGAguaugu | 1141 | ACGAguanga | 1165 | ACGAguang | 1189 | ACGAguangg |
| 1118 | CCGAguaugu | 1142 | CCGAguanga | 1166 | CCGAguangc | 1190 | CCGAguangg |
| 1119 | GCGAguaugu | 1143 | GCGAguanga | 1167 | GCGAguangc | 1191 | GCGAguangg |
| 1120 | UCGAguaugu | 1144 | UCGAguanga | 1168 | UCGAguangc | 1192 | UCGAguangg |
| 1121 | GNGAguaugu | 1145 | GNGAguanga | 1169 | GNGAguangc | 1193 | GNGAguangg |
| 1122 | NGGAguaugu | 1146 | NGGAguanga | 1170 | NGGAguangc | 1194 | NGGAguangg |
| 1123 | AGGAguaugu | 1147 | AGGAguanga | 1171 | AGGAguangc | 1195 | AGGAguangg |
| 1124 | CGGAguaugu | 1148 | CGGAguanga | 1172 | CGGAguangc | 1196 | CGGAguangg |
| 1125 | GGGAguaugu | 1149 | GGGAguanga | 1173 | GGGAguangc | 1197 | GGGAguangg |
| 1126 | UGGAguaugu | 1150 | UGGAguanga | 1174 | UGGAguangc | 1198 | UGGAguangg |
| 1127 | UNGAguaugu | 1151 | UNGAguanga | 1175 | UNGAguangc | 1199 | UNGAguangg |
| 1128 | NUGAguaugu | 1152 | NUGAguanga | 1176 | NUGAguangc | 1200 | NUGAguangg |
| 1129 | AUGAguaugu | 1153 | AUGAguanga | 1177 | AUGAguangc | 1201 | AUGAguangg |
| 1130 | CUGAguaugu | 1154 | CUGAguanga | 1178 | CUGAguangc | 1202 | CUGAguangg |
| 1131 | GUGAguaugu | 1155 | GUGAguanga | 1179 | GUGAguangc | 1203 | GUGAguangg |
| 1132 | UUGAguaugu | 1156 | UUGAguanga | 1180 | UUGAguangc | 1204 | UUGAguangg |
| 1205 | ANGAguangu | 1229 | ANGAgugngn | 1253 | ANGAgugagn | 1277 | ANGAgugcgn |
| 1206 | NAGAguangu | 1230 | NAGAgugngn | 1254 | NAGAgugagn | 1278 | NAGAgugcgn |
| 1207 | AAGAguangu | 1231 | AAGAgugngn | 1255 | AAGAgugagn | 1279 | AAGAgugcgn |
| 1208 | CAGAguangu | 1232 | CAGAgugngn | 1256 | CAGAgugagn | 1280 | CAGAgugcgn |
| 1209 | GAGAguangu | 1233 | GAGAgugngn | 1257 | GAGAgugagn | 1281 | GAGAgugcgn |
| 1210 | UAGAguangu | 1234 | UAGAgugngn | 1258 | UAGAgugagn | 1282 | UAGAgugcgn |
| 1211 | CNGAguangu | 1235 | CNGAgugngn | 1259 | CNGAgugagn | 1283 | CNGAgugcgn |
| 1212 | NCGAguangu | 1236 | NCGAgugngn | 1260 | NCGAgugagn | 1284 | NCGAgugcgn |
| 1213 | ACGAguangu | 1237 | ACGAgugngn | 1261 | ACGAgugagn | 1285 | ACGAgugcgn |
| 1214 | CCGAguangu | 1238 | CCGAgugngn | 1262 | CCGAgugagn | 1286 | CCGAgugcgn |
| 1215 | GCGAguangu | 1239 | GCGAgugngn | 1263 | GCGAgugagn | 1287 | GCGAgugcgn |
| 1216 | UCGAguangu | 1240 | UCGAgugngn | 1264 | UCGAgugagn | 1288 | UCGAgugcgn |
| 1217 | GNGAguangu | 1241 | GNGAgugngn | 1265 | GNGAgugagn | 1289 | GNGAgugcgn |
| 1218 | NGGAguangu | 1242 | NGGAgugngn | 1266 | NGGAgugagn | 1290 | NGGAgugcgn |
| 1219 | AGGAguangu | 1243 | AGGAgugngn | 1267 | AGGAgugagn | 1291 | AGGAgugcgn |
| 1220 | CGGAguangu | 1244 | CGGAgugngn | 1268 | CGGAgugagn | 1292 | CGGAgugcgn |
| 1221 | GGGAguangu | 1245 | GGGAgugngn | 1269 | GGGAgugagn | 1293 | GGGAgugegn |
| 1222 | UGGAguangu | 1246 | UGGAgugngn | 1270 | UGGAgugagn | 1294 | UGGAgugcgn |
| 1223 | UNGAguangu | 1247 | UNGAgugngn | 1271 | UNGAgugagn | 1295 | UNGAgugcgn |
| 1224 | NUGAguangu | 1248 | NUGAgugngn | 1272 | NUGAgugagn | 1296 | NUGAgugcgn |
| 1225 | AUGAguangu | 1249 | AUGAgugngn | 1273 | AUGAgugagn | 1297 | AUGAgugcgn |
| 1226 | CUGAguangu | 1250 | CUGAgugngn | 1274 | CUGAgugagn | 1298 | CUGAgugcgn |
| 1227 | GUGAguangu | 1251 | GUGAgugngn | 1275 | GUGAgugagn | 1299 | GUGAgugcgn |
| 1228 | UUGAguangu | 1252 | UUGAgugngn | 1276 | UUGAgugagn | 1300 | UUGAgugcgn |
| 1301 | ANGAgugggn | 1325 | ANGAgugugn | 1349 | ANGAgugaga | 1373 | ANGAgugcga |
| 1302 | NAGAgugggn | 1326 | NAGAgugugn | 1350 | NAGAgugaga | 1374 | NAGAgugcga |
| 1303 | AAGAgugggn | 1327 | AAGAgugugn | 1351 | AAGAgugaga | 1375 | AAGAgugcga |
| 1304 | CAGAgugggn | 1328 | CAGAgugugn | 1352 | CAGAgugaga | 1376 | CAGAgugcga |
| 1305 | GAGAgugggn | 1329 | GAGAgugugn | 1353 | GAGAgugaga | 1377 | GAGAgugcga |
| 1306 | UAGAgugggn | 1330 | UAGAgugugn | 1354 | UAGAgugaga | 1378 | UAGAgugcga |
| 1307 | CNGAgugggn | 1331 | CNGAgugugn | 1355 | CNGAgugaga | 1379 | CNGAgugcga |
| 1308 | NCGAgugggn | 1332 | NCGAgugugn | 1356 | NCGAgugaga | 1380 | NCGAgugcga |
| 1309 | ACGAgugggn | 1333 | ACGAgugugn | 1357 | ACGAgugaga | 1381 | ACGAgugcga |
| 1310 | CCGAgugggn | 1334 | CCGAgugugn | 1358 | CCGAgugaga | 1382 | CCGAgugcga |
| 1311 | GCGAgugggn | 1335 | GCGAgugugn | 1359 | GCGAgugaga | 1383 | GCGAgugcga |
| 1312 | UCGAgugggn | 1336 | UCGAgugugn | 1360 | UCGAgugaga | 1384 | UCGAgugcga |
| 1313 | GNGAgugggn | 1337 | GNGAgugugn | 1361 | GNGAgugaga | 1385 | GNGAgugcga |
| 1314 | NGGAgugggn | 1338 | NGGAgugugn | 1362 | NGGAgugaga | 1386 | NGGAgugcga |
| 1315 | AGGAgugggn | 1339 | AGGAgugugn | 1363 | AGGAgugaga | 1387 | AGGAgugcga |
| 1316 | CGGAgugggn | 1340 | CGGAgugugn | 1364 | CGGAgugaga | 1388 | CGGAgugcga |
| 1317 | GGGAgugggn | 1341 | GGGAgugugn | 1365 | GGGAgugaga | 1389 | GGGAgugcga |
| 1318 | UGGAgugggn | 1342 | UGGAgugugn | 1366 | UGGAgugaga | 1390 | UGGAgugcga |
| 1319 | UNGAgugggn | 1343 | UNGAgugugn | 1367 | UNGAgugaga | 1391 | UNGAgugcga |
| 1320 | NUGAgugggn | 1344 | NUGAgugugn | 1368 | NUGAgugaga | 1392 | NUGAgugcga |
| 1321 | AUGAgugggn | 1345 | AUGAgugugn | 1369 | AUGAgugaga | 1393 | AUGAgugcga |
| 1322 | CUGAgugggn | 1346 | CUGAgugugn | 1370 | CUGAgugaga | 1394 | CUGAgugcga |
| 1323 | GUGAgugggn | 1347 | GUGAgugugn | 1371 | GUGAgugaga | 1395 | GUGAgugcga |
| 1324 | UUGAgugggn | 1348 | UUGAgugugn | 1372 | UUGAgugaga | 1396 | UUGAgugcga |
| 1397 | ANGAguggga | 1421 | ANGAguguga | 1445 | ANGAgugagc | 1469 | ANGAgugcgc |
| 1398 | NAGAguggga | 1422 | NAGAguguga | 1446 | NAGAgugagc | 1470 | NAGAgugcgc |
| 1399 | AAGAguggga | 1423 | AAGAguguga | 1447 | AAGAgugagc | 1471 | AAGAgugcgc |
| 1400 | CAGAguggga | 1424 | CAGAguguga | 1448 | CAGAgugagc | 1472 | CAGAgugcgc |
| 1401 | GAGAguggga | 1425 | GAGAguguga | 1449 | GAGAgugagc | 1473 | GAGAgugcgc |
| 1402 | UAGAguggga | 1426 | UAGAguguga | 1450 | UAGAgugagc | 1474 | UAGAgugcgc |
| 1403 | CNGAguggga | 1427 | CNGAguguga | 1451 | CNGAgugagc | 1475 | CNGAgugcgc |
| 1404 | NCGAguggga | 1428 | NCGAguguga | 1452 | NCGAgugagc | 1476 | NCGAgugcgc |
| 1405 | ACGAguggga | 1429 | ACGAguguga | 1453 | ACGAgugagc | 1477 | ACGAgugcgc |
| 1406 | CCGAguggga | 1430 | CCGAguguga | 1454 | CCGAgugagc | 1478 | CCGAgugcgc |
| 1407 | GCGAguggga | 1431 | GCGAguguga | 1455 | GCGAgugagc | 1479 | GCGAgugcgc |
| 1408 | UCGAguggga | 1432 | UCGAguguga | 1456 | UCGAgugagc | 1480 | UCGAgugcgc |
| 1409 | GNGAguggga | 1433 | GNGAguguga | 1457 | GNGAgugagc | 1481 | GNGAgugcgc |
| 1410 | NGGAguggga | 1434 | NGGAguguga | 1458 | NGGAgugagc | 1482 | NGGAgugcgc |
| 1411 | AGGAguggga | 1435 | AGGAguguga | 1459 | AGGAgugagc | 1483 | AGGAgugcgc |
| 1412 | CGGAguggga | 1436 | CGGAguguga | 1460 | CGGAgugagc | 1484 | CGGAgugcgc |
| 1413 | GGGAguggga | 1437 | GGGAguguga | 1461 | GGGAgugagc | 1485 | GGGAgugcgc |
| 1414 | UGGAguggga | 1438 | UGGAguguga | 1462 | UGGAgugagc | 1486 | UGGAgugcgc |
| 1415 | UNGAguggga | 1439 | UNGAguguga | 1463 | UNGAgugagc | 1487 | UNGAgugcgc |
| 1416 | NUGAguggga | 1440 | NUGAguguga | 1464 | NUGAgugagc | 1488 | NUGAgugcgc |
| 1417 | AUGAguggga | 1441 | AUGAguguga | 1465 | AUGAgugagc | 1489 | AUGAgugcgc |
| 1418 | CUGAguggga | 1442 | CUGAguguga | 1466 | CUGAgugagc | 1490 | CUGAgugcgc |
| 1419 | GUGAguggga | 1443 | GUGAguguga | 1467 | GUGAgugagc | 1491 | GUGAgugcgc |
| 1420 | UUGAguggga | 1444 | UUGAguguga | 1468 | UUGAgugagc | 1492 | UUGAgugcgc |
| 1493 | ANGAgugggc | 1517 | ANGAgugugc | 1541 | ANGAgugagg | 1565 | ANGAgugcgg |
| 1494 | NAGAgugggc | 1518 | NAGAgugugc | 1542 | NAGAgugagg | 1566 | NAGAgugcgg |
| 1495 | AAGAgugggc | 1519 | AAGAgugugc | 1543 | AAGAgugagg | 1567 | AAGAgugcgg |
| 1496 | CAGAgugggc | 1520 | CAGAgugugc | 1544 | CAGAgugagg | 1568 | CAGAgugcgg |
| 1497 | GAGAgugggc | 1521 | GAGAgugugc | 1545 | GAGAgugagg | 1569 | GAGAgugcgg |
| 1498 | UAGAgugggc | 1522 | UAGAgugugc | 1546 | UAGAgugagg | 1570 | UAGAgugcgg |
| 1499 | CNGAgugggc | 1523 | CNGAgugugc | 1547 | CNGAgugagg | 1571 | CNGAgugcgg |
| 1500 | NCGAguggg | 1524 | NCGAgugugc | 1548 | NCGAgugagg | 1572 | NCGAgugcgg |
| 1501 | ACGAgugggc | 1525 | ACGAgugugc | 1549 | ACGAgugagg | 1573 | ACGAgugcgg |
| 1502 | CCGAgugggc | 1526 | CCGAgugugc | 1550 | CCGAgugagg | 1574 | CCGAgugcgg |
| 1503 | GCGAgugggc | 1527 | GCGAgugugc | 1551 | GCGAgugagg | 1575 | GCGAgugcgg |
| 1504 | UCGAgugggc | 1528 | UCGAgugugc | 1552 | UCGAgugagg | 1576 | UCGAgugcgg |
| 1505 | GNGAgugggc | 1529 | GNGAgugugc | 1553 | GNGAgugagg | 1577 | GNGAgugcgg |
| 1506 | NGGAgugggc | 1530 | NGGAgugugc | 1554 | NGGAgugagg | 1578 | NGGAgugcgg |
| 1507 | AGGAgugggc | 1531 | AGGAgugugc | 1555 | AGGAgugagg | 1579 | AGGAgugcgg |
| 1508 | CGGAgugggc | 1532 | CGGAgugugc | 1556 | CGGAgugagg | 1580 | CGGAgugcgg |
| 1509 | GGGAgugggc | 1533 | GGGAgugugc | 1557 | GGGAgugagg | 1581 | GGGAgugcgg |
| 1510 | UGGAgugggc | 1534 | UGGAgugugc | 1558 | UGGAgugagg | 1582 | UGGAgugcgg |
| 1511 | UNGAgugggc | 1535 | UNGAgugugc | 1559 | UNGAgugagg | 1583 | UNGAgugcgg |
| 1512 | NUGAgugggc | 1536 | NUGAgugugc | 1560 | NUGAgugagg | 1584 | NUGAgugcgg |
| 1513 | AUGAgugggc | 1537 | AUGAgugugc | 1561 | AUGAgugagg | 1585 | AUGAgugcgg |
| 1514 | CUGAgugggo | 1538 | CUGAgugugc | 1562 | CUGAgugagg | 1586 | CUGAgugcgg |
| 1515 | GUGAgugggc | 1539 | GUGAgugugc | 1563 | GUGAgugagg | 1587 | GUGAgugcgg |
| 1516 | UUGAgugggc | 1540 | UUGAgugugc | 1564 | UUGAgugagg | 1588 | UUGAgugcgg |
| 1589 | ANGAgugggg | 1613 | ANGAgugugg | 1637 | ANGAgugagu | 1661 | ANGAgugcgu |
| 1590 | NAGAgugggg | 1614 | NAGAgugugg | 1638 | NAGAgugagu | 1662 | NAGAgugcgu |
| 1591 | AAGAgugggg | 1615 | AAGAgugugg | 1639 | AAGAgugagu | 1663 | AAGAgugcgu |
| 1592 | CAGAgugggg | 1616 | CAGAgugugg | 1640 | CAGAgugagu | 1664 | CAGAgugcgu |
| 1593 | GAGAgugggg | 1617 | GAGAgugugg | 1641 | GAGAgugagu | 1665 | GAGAgugcgu |
| 1594 | UAGAgugggg | 1618 | UAGAgugugg | 1642 | UAGAgugagu | 1666 | UAGAgugcgu |
| 1595 | CNGAgugggg | 1619 | CNGAgugugg | 1643 | CNGAgugagu | 1667 | CNGAgugcgu |
| 1596 | NCGAgugggg | 1620 | NCGAgugugg | 1644 | NCGAgugagu | 1668 | NCGAgugcgu |
| 1597 | ACGAgugggg | 1621 | ACGAgugugg | 1645 | ACGAgugagu | 1669 | ACGAgugcgu |
| 1598 | CCGAgugggg | 1622 | CCGAgugugg | 1646 | CCGAgugagu | 1670 | CCGAgugcgu |
| 1599 | GCGAgugggg | 1623 | GCGAgugugg | 1647 | GCGAgugagu | 1671 | GCGAgugcgu |
| 1600 | UCGAgugggg | 1624 | UCGAgugugg | 1648 | UCGAgugagu | 1672 | UCGAgugcgu |
| 1601 | GNGAgugggg | 1625 | GNGAgugugg | 1649 | GNGAgugagu | 1673 | GNGAgugcgu |
| 1602 | NGGAgugggg | 1626 | NGGAgugugg | 1650 | NGGAgugagu | 1674 | NGGAgugcgu |
| 1603 | AGGAgugggg | 1627 | AGGAgugugg | 1651 | AGGAgugagul | 1675 | AGGAgugcgu |
| 1604 | CGGAgugggg | 1628 | CGGAgugugg | 1652 | CGGAgugagu | 1676 | CGGAgugcgu |
| 1605 | GGGAgugggg | 1629 | GGGAgugugg | 1653 | GGGAgugagu | 1677 | GGGAgugcgu |
| 1606 | UGGAgugggg | 1630 | UGGAgugugg | 1654 | UGGAgugagu | 1678 | UGGAgugcgu |
| 1607 | UNGAgugggg | 1631 | UNGAgugugg | 1655 | UNGAgugagu | 1679 | UNGAgugcgu |
| 1608 | NUGAgugggg | 1632 | NUGAgugugg | 1656 | NUGAgugagu | 1680 | NUGAgugcgu |
| 1609 | AUGAgugggg | 1633 | AUGAgugugg | 1657 | AUGAgugagu | 1681 | AUGAgugcgu |
| 1610 | CUGAgugggg | 1634 | CUGAgugugg | 1658 | CUGAgugagu | 1682 | CUGAgugcgu |
| 1611 | GUGAgugggg | 1635 | GUGAgugugg | 1659 | GUGAgugagu | 1683 | GUGAgugcgu |
| 1612 | UUGAgugggg | 1636 | UUGAgugugg | 1660 | UUGAgugagu | 1684 | UUGAgugcgu |
| 1685 | ANGAgugggu | 1709 | ANGAgugugu | 1733 | ANGAgugnga | 1757 | ANGAgugngc |
| 1686 | NAGAgugggu | 1710 | NAGAgugugu | 1734 | NAGAgugnga | 1758 | NAGAgugngc |
| 1687 | AAGAgugggu | 1711 | AAGAgugugu | 1735 | AAGAgugnga | 1759 | AAGAgugngc |
| 1688 | CAGAgugggu | 1712 | CAGAgugugu | 1736 | CAGAgugnga | 1760 | CAGAgugngc |
| 1689 | GAGAgugggu | 1713 | GAGAgugugu | 1737 | GAGAgugnga | 1761 | GAGAgugngc |
| 1690 | UAGAgugggu | 1714 | UAGAgugugu | 1738 | UAGAgugnga | 1762 | UAGAgugngc |
| 1691 | CNGAgugggu | 1715 | CNGAgugugu | 1739 | CNGAgugnga | 1763 | CNGAgugngc |
| 1692 | NCGAgugggu | 1716 | NCGAgugugu | 1740 | NCGAgugnga | 1764 | NCGAgugngc |
| 1693 | ACGAgugggu | 1717 | ACGAgugugu | 1741 | ACGAgugnga | 1765 | ACGAgugngc |
| 1694 | CCGAgugggu | 1718 | CCGAgugugu | 1742 | CCGAgugnga | 1766 | CCGAgugngc |
| 1695 | GCGAgugggu | 1719 | GCGAgugugu | 1743 | GCGAgugnga | 1767 | GCGAgugngc |
| 1696 | UCGAgugggu | 1720 | UCGAgugugu | 1744 | UCGAgugnga | 1768 | UCGAgugngc |
| 1697 | GNGAgugggu | 1721 | GNGAgugugu | 1745 | GNGAgugnga | 1769 | GNGAgugngc |
| 1698 | NGGAgugggu | 1722 | NGGAgugugu | 1746 | NGGAgugnga | 1770 | NGGAgugngc |
| 1699 | AGGAguggg? | 1723 | AGGAgugugu | 1747 | AGGAgugnga | 1771 | AGGAgugngc |
| 1700 | CGGAgugggu | 1724 | CGGAgugugu | 1748 | CGGAgugnga | 1772 | CGGAgugngc |
| 1701 | GGGAgugggu | 1725 | GGGAgugugu | 1749 | GGGAgugnga | 1773 | GGGAgugngc |
| 1702 | UGGAgugggu | 1726 | UGGAgugugu | 1750 | UGGAgugnga | 1774 | UGGAgugngc |
| 1703 | UNGAgugggu | 1727 | UNGAgugugu | 1751 | UNGAgugnga | 1775 | UNGAgugngc |
| 1704 | NUGAgugggu | 1728 | NUGAgugugu | 1752 | NUGAgugnga | 1776 | NUGAgugngc |
| 1705 | AUGAgugggu | 1729 | AUGAgugugu | 1753 | AUGAgugnga | 1777 | AUGAgugngc |
| 1706 | CUGAgugggu | 1730 | CUGAgugugu | 1754 | CUGAgugnga | 1778 | CUGAgugngc |
| 1707 | GUGAgugggu | 1731 | GUGAgugugu | 1755 | GUGAgugnga | 1779 | GUGAgugngc |
| 1708 | UUGAgugggu | 1732 | UUGAgugugu | 1756 | UUGAgugnga | 1780 | UUGAgugngc |
| 1781 | ANGAgugngg | 1793 | GNGAgugngg | 1805 | ANGAgugngu | 1817 | GNGAgugngu |
| 1782 | NAGAgugngg | 1794 | NGGAgugngg | 1806 | NAGAgugngu | 1818 | NGGAgugngu |
| 1783 | AAGAgugngg | 1795 | AGGAgugngg | 1807 | AAGAgugngu | 1819 | AGGAgugngu |
| 1784 | CAGAgugngg | 1796 | CGGAgugngg | 1808 | CAGAgugngu | 1820 | CGGAgugngu |
| 1785 | GAGAgugngg | 1797 | GGGAgugngg | 1809 | GAGAgugngu | 1821 | GGGAgugngu |
| 1786 | UAGAgugngg | 1798 | UGGAgugngg | 1810 | UAGAgugngu | 1822 | UGGAgugngu |
| 1787 | CNGAgugngg | 1799 | UNGAgugngg | 1811 | CNGAgugngu | 1823 | UNGAgugngu |
| 1788 | NCGAgugngg | 1800 | NUGAgugngg | 1812 | NCGAgugngu | 1824 | NUGAgugngu |
| 1789 | ACGAgugngg | 1801 | AUGAgugngg | 1813 | ACGAgugngu | 1825 | AUGAgugngu |
| 1790 | CCGAgugngg | 1802 | CUGAgugngg | 1814 | CCGAgugngu | 1826 | CUGAgugngu |
| 1791 | GCGAgugngg | 1803 | GUGAgugngg | 1815 | GCGAgugngu | 1827 | GUGAgugngu |
| 1792 | UCGAgugngg | 1804 | UUGAgugngg | 1816 | UCGAgugngu | 1828 | UUGAgugngu |

[0015] In one embodiment, provided herein are methods for modulating the amount of one, two, three or more RNA transcripts of a gene, by way of nonlimiting example, disclosed in Table 1, infra, the method comprising contacting a cell with a compound of Formula (I) or a form thereof. In another embodiment, provided herein are methods for modulating the amount of one, two, three or more RNA transcripts of a gene, disclosed in Table 16 or Tables 2-7, infra, wherein the precursor transcript transcribed from the gene comprises an intronic REMS, the method comprising contacting a cell with a compound of Formula (I) or a form thereof. In another embodiment, provided herein are methods for modulating the amount of one, two, three or more RNA transcripts of a gene, disclosed in International Patent Application No. PCT/US2014/071252 (International Publication No. WO 2015/105657), wherein the precursor transcript transcribed from the gene comprises an intronic REMS, the method comprising contacting a cell with a compound of Formula (I) or a form thereof. In another embodiment, provided herein are methods for modulating the amount of one, two, three or more RNA transcripts of a gene, disclosed in International Patent Application No. PCT/US2016/034864 (International Publication No. WO 2016/196386), wherein the precursor transcript transcribed from the gene comprises an intronic REMS, the method comprising contacting a cell with a compound of Formula (I) or a form thereof.

[0016] In another embodiment, provided herein are methods for modulating the amount of one, two, three or more RNA transcripts of a gene, disclosed in Table 1, infra, wherein the precursor transcript transcribed from the gene comprises an intronic REMS, the method comprising contacting a cell with a compound of Formula (I) or a form thereof. In another embodiment, provided herein are methods for modulating the amount of one, two, three or more RNA transcripts of a gene disclosed in Table 7, infra, comprising contacting a cell with a compound of Formula (I) or a form thereof. See the example section for additional information regarding the genes in Table 7. In certain embodiments, the cell is contacted with the compound of Formula (I) or a form thereof in a cell culture. In other embodiments, the cell is contacted with the compound of Formula (I) or a form thereof in a subject (e.g., a non-human animal subject or a human subject). In certain embodiments, a compound of Formula (I) is a compound of Formula (II), Formula (III), Formula (IV), Formula (V), Formula (VI), Formula (VII), Formula (VIII), Formula (IX), Formula (X), Formula (XI), Formula (XII), Formula (XIII), or Formula (XIV) described infra. In some embodiments, a compound of Formula (I) is a compound selected from a compound described herein.

[0017] In another aspect, provided herein are methods for modulating the amount of one, two, three or more RNA transcripts of a gene, wherein the precursor RNA transcript transcribed from the gene comprises an intronic REMS, the methods comprising administering to a human or non-human subject a compound of Formula (I) or a form thereof, or a pharmaceutical composition comprising a compound of Formula (I) or a form thereof and a pharmaceutically acceptable carrier, excipient or diluent. In one embodiment, provided herein are methods for modulating the amount of one, two, three or more RNA transcripts of a gene, by way of nonlimiting example, disclosed in Table 1, infra, the methods comprising administering to a human or non-human subject thereof a compound of Formula (I) or a form thereof, or a pharmaceutical composition comprising a compound of Formula (I) or a form thereof and a pharmaceutically acceptable carrier, excipient or diluent.

[0018] In another embodiment, provided herein are methods for modulating the amount of one, two, three or more RNA transcripts of a gene, disclosed in Tables 2-7, infra, wherein the precursor RNA transcript transcribed from the gene comprises an intronic REMS, the methods comprising administering to a human or non-human subject thereof a compound of Formula (I) or a form thereof, or a pharmaceutical composition comprising a compound of Formula (I) or a form thereof and a pharmaceutically acceptable carrier, excipient or diluent.

[0019] In another embodiment, provided herein are methods for modulating the amount of one, two, three or more RNA transcripts of a gene, disclosed in International Patent Application No. PCT/US2014/071252 (International Publication No. WO 2015/105657), wherein the precursor RNA transcript transcribed from the gene comprises an intronic REMS, the methods comprising administering to a human or non-human subject a compound of Formula (I) or a form thereof, or a pharmaceutical composition comprising a compound of Formula (I) or a form thereof and a pharmaceutically acceptable carrier, excipient or diluent. In another embodiment, provided herein are methods for modulating the amount of one, two, three or more RNA transcripts of a gene, disclosed in International Patent Application No. PCT/US2016/034864 (International Publication No. WO 2016/196386), wherein the precursor transcript transcribed from the gene comprises an intronic REMS, the method comprising contacting a cell with a compound of Formula (I) or a form thereof, or a pharmaceutical composition comprising a compound of Formula (I) or a form thereof and a pharmaceutically acceptable carrier, excipient or diluent. In another embodiment, provided herein are methods for modulating the amount of one, two, three or more RNA transcripts of a gene, disclosed in Table 1, infra, wherein the precursor RNA transcript transcribed from the gene comprises an intronic REMS, the methods comprising administering to a human or non-human subject a compound of Formula (I) or a form thereof, or a pharmaceutical composition comprising a compound of Formula (I) or a form thereof and a pharmaceutically acceptable carrier, excipient or diluent.

[0020] In another embodiment, provided herein are methods for modulating the amount of one, two, three or more RNA transcripts of a gene disclosed in Table 7, infra, comprising administering to a human or non-human subject a compound of Formula (I) or a form thereof, or a pharmaceutical composition comprising a compound of Formula (I) or a form thereof and a pharmaceutically acceptable carrier, excipient or diluent. See the example section for additional information regarding the genes in Table 7. In certain embodiments, a compound of Formula (I) is a compound of Formula (II), Formula (III), Formula (IV), Formula (V), Formula (VI), Formula (VII), Formula (VIII), Formula (IX), Formula (X), Formula (XI), Formula (XII), Formula (XIII), or Formula (XIV) described infra. In some embodiments, a compound of Formula (I) is a compound selected from a compound described herein.

[0021] In another embodiment, provided herein is a method for modulating the amount of an RNA transcript comprising a RNA nucleotide sequence, wherein the RNA nucleotide sequence comprises two exons and an intron, wherein one exon is upstream of the intron and the other exon is downstream of the intron, wherein the RNA nucleotide sequence of the intron comprises in 5′ to 3′ order: a first 5′ splice site, a first branch point, a first 3′ splice site, an iREMS, a second branch point and a second 3′ splice site, wherein the iREMS comprises an RNA sequence GAgurngn (SEQ ID NO: 2), and wherein r is adenine or guanine and n is any nucleotide, the method comprising contacting the RNA transcript with a compound described herein (for example, a compound of Formula (I) or a form thereof or another splicing inducer).

[0022] In another embodiment, provided herein is a method for modulating the amount of an RNA transcript comprising a RNA nucleotide sequence, wherein the RNA nucleotide sequence comprises two exons and an intron, wherein one exon is upstream of the intron and the other exon is downstream of the intron, wherein the RNA nucleotide sequence of the intron comprises in 5′ to 3′ order: a first branch point, a first 3′ splice site, and an iREMS, wherein the iREMS comprises an RNA sequence GAgurngn (SEQ ID NO: 2), and wherein r is adenine or guanine and n is any nucleotide, the method comprising contacting the RNA transcript with a compound described herein (for example, a compound of Formula (I) or a form thereof or another splicing inducer).

[0023] In another embodiment, provided herein is a method for modulating the amount of an RNA transcript comprising a RNA nucleotide sequence, wherein the RNA nucleotide sequence comprises two exons and an intron, and wherein the RNA nucleotide sequence comprises exonic and intronic elements illustrated in FIG. 1A, the method comprising contacting the RNA transcript with a compound described herein (for example, a compound of Formula (I) or a form thereof or another splicing inducer).

[0024] In another embodiment, provided herein is a method for modulating the amount of an RNA transcript comprising a RNA nucleotide sequence, wherein the RNA nucleotide sequence comprises two exons and an intron, and wherein the RNA nucleotide sequence comprises exonic and intronic elements illustrated in FIG. 1B, the method comprising contacting the RNA transcript with a compound described herein (for example, a compound of Formula (I) or a form thereof or another splicing inducer).

[0025] In another embodiment, provided herein is a method for modulating the amount of an RNA transcript comprising a RNA nucleotide sequence, wherein the RNA nucleotide sequence comprises three exons and two introns, and wherein the RNA nucleotide sequence comprises exonic and intronic elements illustrated in FIG. 1C, the method comprising contacting the RNA transcript with a compound described herein (for example, a compound of Formula (I) or a form thereof or another splicing inducer).

[0026] In a specific embodiment, the RNA transcript is the RNA transcript of a gene described in a table in this disclosure.

[0027] In another embodiment, provided herein is a method for modulating the amount of the product of a gene (such as an RNA transcript or a protein) in a subject, wherein the gene comprises a DNA nucleotide sequence encoding two exons and an intron, wherein the nucleotide sequence encoding one exon is upstream of the nucleotide sequence encoding the intron and the nucleotide sequence encoding the other exon is downstream of the nucleotide sequence encoding the intron, wherein the DNA nucleotide sequence encoding the intron comprises in 5′ to 3′ order: a nucleotide sequence encoding a first 5′ splice site, a nucleotide sequence encoding a first branch point, a nucleotide sequence encoding a first 3′ splice site, a nucleotide sequence encoding an IREMS, a nucleotide sequence encoding a second branch point and a nucleotide sequence encoding a second 3′ splice site, wherein the iREMS comprises a DNA sequence GAgtrngn (SEQ ID NO: 4), and wherein r is adenine or guanine and n is any nucleotide, the method comprising administering a compound described herein (for example, a compound of Formula (I) or a form thereof or another splicing inducer) to the subject.

[0028] In another embodiment, provided herein is a method for modulating the amount of the product of a gene (such as an RNA transcript or protein) in a subject, wherein the gene comprises a DNA nucleotide sequence encoding two exons and an intron, wherein the nucleotide sequence encoding one exon is upstream of the nucleotide sequence encoding the intron and the nucleotide sequence encoding the other exon is downstream of the nucleotide sequence encoding the intron, wherein the DNA nucleotide sequence of the intron comprises in 5′ to 3′ order: a nucleotide sequence encoding a first branch point, a nucleotide sequence encoding a first 3′ splice site, and a nucleotide sequence encoding an iREMS, wherein the iREMS comprises a DNA sequence GAgtrngn (SEQ ID NO: 4), and wherein r is adenine or guanine and n is any nucleotide, the method comprising administering a compound described herein (for example, a compound of Formula (I) or a form thereof or another splicing inducer) to the subject.

[0029] In another embodiment, provided herein is a method for modulating the amount of the product of a gene (such as an RNA transcript or protein) in a subject, wherein the gene comprises a DNA nucleotide sequence encoding two exons and an intron, and wherein the DNA nucleotide sequence comprises exonic and intronic elements illustrated in FIG. 1A, the method comprising administering a compound described herein (for example, a compound of Formula (I) or a form thereof or another splicing inducer) to the subject.

[0030] In another embodiment, provided herein is a method for modulating the amount of the product of a gene (such as an RNA transcript or protein) in a subject, wherein the gene comprises a DNA nucleotide sequence encoding two exons and an intron, and wherein the DNA nucleotide sequence comprises exonic and intronic elements illustrated in FIG. 1B, the method comprising administering a compound described herein (for example, a compound of Formula (I) or a form thereof or another splicing inducer) to the subject.

[0031] In another embodiment, provided herein is a method for modulating the amount of the product of a gene (such as an RNA transcript or protein) in a subject, wherein the gene comprises a DNA nucleotide sequence encoding two exons and an intron, and wherein the DNA nucleotide sequence comprises exonic and intronic elements illustrated in FIG. 1C, the method comprising administering a compound described herein (for example, a compound of Formula (I) or a form thereof or another splicing inducer) to the subject.

[0032] In a specific embodiment, the gene is a gene described in a table in this disclosure.

[0033] In another aspect, provided herein are methods for preventing and/or treating a disease associated with the aberrant expression of a product of a gene (e.g., an mRNA transcript or protein), wherein the precursor RNA transcript transcribed from the gene comprises an intronic REMS, the methods comprising administering to a human or non-human subject a compound of Formula (I) or a form thereof, or a pharmaceutical composition comprising a compound of Formula (I) or a form thereof and a pharmaceutically acceptable carrier, excipient or diluent. In one embodiment, provided herein are methods for preventing and/or treating a disease associated with aberrant expression of a product of a gene (e.g., an mRNA, RNA transcript or protein), by way of nonlimiting example, disclosed in Table 1, infra, the methods comprising administering to a human or non-human subject a compound of Formula (I) or a form thereof, or a pharmaceutical composition comprising a compound of Formula (I) or a form thereof and a pharmaceutically acceptable carrier, excipient or diluent. In another embodiment, provided herein are methods for preventing and/or treating a disease associated with aberrant expression of a product of a gene (e.g., an mRNA, RNA transcript or protein), disclosed in Tables 2-7, infra, wherein the precursor RNA transcript transcribed from the gene comprises an intronic REMS, the methods comprising administering to a human or non-human subject a compound of Formula (I) or a form thereof, or a pharmaceutical composition comprising a compound of Formula (I) or a form thereof and a pharmaceutically acceptable carrier, excipient or diluent. In another embodiment, provided herein are methods for preventing and/or treating a disease associated with aberrant expression of a product of a gene (e.g., an mRNA, RNA transcript or protein), by way of nonlimiting example, disclosed in International Patent Application No. PCT/US2014/071252 (International Publication No. WO 2015/105657), wherein the precursor RNA transcript transcribed from the gene comprises an intronic REMS, the methods comprising administering to a human or non-human subject a compound of Formula (I) or a form thereof, or a pharmaceutical composition comprising a compound of Formula (I) or a form thereof and a pharmaceutically acceptable carrier, excipient or diluent. In another embodiment, provided herein are methods for preventing and/or treating a disease associated with aberrant expression of a product of a gene (e.g., an mRNA, RNA transcript or protein), by way of nonlimiting example, disclosed in International Patent Application No. PCT/US2016/034864 (International Publication No. WO 2016/196386), wherein the precursor RNA transcript transcribed from the gene comprises an intronic REMS, the methods comprising administering to a human or non-human subject a compound of Formula (I) or a form thereof, or a pharmaceutical composition comprising a compound of Formula (I) or a form thereof and a pharmaceutically acceptable carrier, excipient or diluent. In another embodiment, provided herein are methods for preventing and/or treating a disease associated with aberrant expression of a product of a gene (e.g., an mRNA, RNA transcript or protein), disclosed in Table 1, infra, wherein the precursor RNA transcript transcribed from the gene comprises an intronic REMS, the methods comprising administering to a human or non-human subject a compound of Formula (I) or a form thereof, or a pharmaceutical composition comprising a compound of Formula (I) or a form thereof and a pharmaceutically acceptable carrier, excipient or diluent. In another embodiment, provided herein are methods for preventing and/or treating a disease associated with aberrant expression of a product of a gene disclosed in Table 7, infra, (e.g., an mRNA, RNA transcript or protein), comprising administering to a human or non-human subject a compound of Formula (I) or a form thereof, or a pharmaceutical composition comprising a compound of Formula (I) or a form thereof and a pharmaceutically acceptable carrier, excipient or diluent. See the example section for additional information regarding the genes in Table 7. In certain embodiments, a compound of Formula (I) is a compound of Formula (II), Formula (III), Formula (IV), Formula (V), Formula (VI), Formula (VII), Formula (VIII), Formula (IX), Formula (X), Formula (XI), Formula (XII), Formula (XIII), or Formula (XIV) described infra. In some embodiments, a compound of Formula (I) is a compound selected from a compound described herein.

[0034] In another aspect, provided herein are methods for preventing and/or treating a disease in which a change in the level of expression of one, two, three or more RNA isoforms encoded by a gene is beneficial to the prevention and/or treatment of the disease, wherein the precursor RNA transcript transcribed from the gene comprises an intronic REMS, the methods comprising administering to a human or non-human subject a compound of Formula (I) or a form thereof, or a pharmaceutical composition comprising a compound of Formula (I) or a form thereof and a pharmaceutically acceptable carrier, excipient or diluent. In one embodiment, provided herein are methods for preventing and/or treating a disease in which the alteration (e.g., increase or decrease) in the expression one, two, three or more RNA isoforms encoded by a gene, by way of nonlimiting example, disclosed in Table 1, infra, is beneficial to the prevention and/or treatment of the disease, the methods comprising administering to a human or non-human subject a compound of Formula (I) or a form thereof, or a pharmaceutical composition comprising a compound of Formula (I) or a form thereof and a pharmaceutically acceptable carrier, excipient or diluent.

[0035] In another embodiment, provided herein are methods for preventing and/or treating a disease in which the alteration (e.g., increase or decrease) in the expression one, two, three or more RNA isoforms encoded by a gene, disclosed in Tables 2-7, infra, is beneficial to the prevention and/or treatment of the disease, wherein the precursor RNA transcript transcribed from the gene comprises an intronic REMS, the methods comprising administering to a human or non-human subject a compound of Formula (I) or a form thereof, or a pharmaceutical composition comprising a compound of Formula (I) or a form thereof and a pharmaceutically acceptable carrier, excipient or diluent.

[0036] In another embodiment, provided herein are methods for preventing and/or treating a disease in which the alteration (e.g., increase or decrease) in the expression one, two, three or more RNA isoforms encoded by a gene, disclosed in International Patent Application No. PCT/US2014/071252 (International Publication No. WO 2015/105657), is beneficial to the prevention and/or treatment of the disease, wherein the precursor RNA transcript transcribed from the gene comprises an intronic REMS, the methods comprising administering to a human or non-human subject a compound of Formula (I) or a form thereof, or a pharmaceutical composition comprising a compound of Formula (I) or a form thereof and a pharmaceutically acceptable carrier, excipient or diluent. In another embodiment, provided herein are methods for preventing and/or treating a disease in which the alteration (e.g., increase or decrease) in the expression one, two, three or more RNA isoforms encoded by a gene, disclosed in International Patent Application No. PCT/US2016/034864 (International Publication No. WO 2016/196386), is beneficial to the prevention and/or treatment of the disease, wherein the precursor RNA transcript transcribed from the gene comprises an intronic REMS, the methods comprising administering to a human or non-human subject a compound of Formula (I) or a form thereof, or a pharmaceutical composition comprising a compound of Formula (I) or a form thereof and a pharmaceutically acceptable carrier, excipient or diluent. In another embodiment, provided herein are methods for preventing and/or treating a disease in which the alteration (e.g., increase or decrease) in the expression one, two, three or more RNA isoforms encoded by a gene, disclosed in Table 1, infra, is beneficial to the prevention and/or treatment of the disease, wherein the precursor RNA transcript transcribed from the gene comprises an intronic REMS, the methods comprising administering to a human or non-human subject a compound of Formula (I) or a form thereof, or a pharmaceutical composition comprising a compound of Formula (I) or a form thereof and a pharmaceutically acceptable carrier, excipient or diluent. In another embodiment, provided herein are methods for preventing and/or treating a disease in which the alteration (e.g., increase or decrease) in the expression one, two, three or more RNA isoforms encoded by a gene disclosed in Table 1, infra, is beneficial to the prevention and/or treatment of the disease, the methods comprising administering to a human or non-human subject a compound of Formula (I) or a form thereof, or a pharmaceutical composition comprising a compound of Formula (I) or a form thereof and a pharmaceutically acceptable carrier, excipient or diluent. In a specific embodiment, one, two, three or more RNA isoforms encoded by a gene disclosed in Table 7, infra, are decreased following administration of a compound of Formula (I) or a form thereof and a pharmaceutically acceptable carrier, excipient or diluent. See the example section for additional information regarding the genes in Table 7. In certain embodiments, a compound of Formula (I) is a compound of Formula (II), Formula (III), Formula (IV), Formula (V), Formula (VI), Formula (VII), Formula (VIII), Formula (IX), Formula (X), Formula (XI), Formula (XII), Formula (XIII), or Formula (XIV) described infra. In some embodiments, a compound of Formula (I) is a compound selected from a compound described herein.

[0037] In another aspect, provided herein are methods for preventing and/or treating a disease in which a change in the level of expression of one, two, three or more protein isoforms encoded by a gene is beneficial to the prevention and/or treatment of the disease, wherein the precursor RNA transcript transcribed from the gene comprises an intronic REMS, the methods comprising administering to a human or non-human subject a compound of Formula (I) or a form thereof, or a pharmaceutical composition comprising a compound of Formula (I) or a form thereof and a pharmaceutically acceptable carrier, excipient or diluent. In one embodiment, provided herein are methods for preventing and/or treating a disease in which the alteration (e.g., increase or decrease) in the expression one, two, three or more protein isoforms encoded by a gene, by way of nonlimiting example, disclosed in Table 1, infra, is beneficial to the prevention and/or treatment of the disease, the methods comprising administering to a human or non-human subject a compound of Formula (I) or a form thereof, or a pharmaceutical composition comprising a compound of Formula (I) or a form thereof and a pharmaceutically acceptable carrier, excipient or diluent.

[0038] In another embodiment, provided herein are methods for preventing and/or treating a disease in which the alteration (e.g., increase or decrease) in the expression one, two, three or more protein isoforms encoded by a gene, disclosed in Tables 2-7, infra, is beneficial to the prevention and/or treatment of the disease, wherein the precursor RNA transcript transcribed from the gene comprises an intronic REMS, the methods comprising administering to a human or non-human subject a compound of Formula (I) or a form thereof, or a pharmaceutical composition comprising a compound of Formula (I) or a form thereof and a pharmaceutically acceptable carrier, excipient or diluent. In another embodiment, provided herein are methods for preventing and/or treating a disease in which the alteration (e.g., increase or decrease) in the expression one, two, three or more protein isoforms encoded by a gene, disclosed in International Patent Application No. PCT/US2014/071252 (International Publication No. WO 2015/105657), is beneficial to the prevention and/or treatment of the disease, wherein the precursor RNA transcript transcribed from the gene comprises an intronic REMS, the methods comprising administering to a human or non-human subject a compound of Formula (I) or a form thereof, or a pharmaceutical composition comprising a compound of Formula (I) or a form thereof and a pharmaceutically acceptable carrier, excipient or diluent. In another embodiment, provided herein are methods for preventing and/or treating a disease in which the alteration (e.g., increase or decrease) in the expression one, two, three or more protein isoforms encoded by a gene, disclosed in International Patent Application No. PCT/US2016/034864 (International Publication No. WO 2016/196386), is beneficial to the prevention and/or treatment of the disease, wherein the precursor RNA transcript transcribed from the gene comprises an intronic REMS, the methods comprising administering to a human or non-human subject a compound of Formula (I) or a form thereof, or a pharmaceutical composition comprising a compound of Formula (I) or a form thereof and a pharmaceutically acceptable carrier, excipient or diluent. In another embodiment, provided herein are methods for preventing and/or treating a disease in which the alteration (e.g., increase or decrease) in the expression one, two, three or more protein isoforms encoded by a gene, disclosed in Table 1, infra, is beneficial to the prevention and/or treatment of the disease, wherein the precursor RNA transcript transcribed from the gene comprises an intronic REMS, the methods comprising administering to a human or non-human subject a compound of Formula (I) or a form thereof, or a pharmaceutical composition comprising a compound of Formula (I) or a form thereof and a pharmaceutically acceptable carrier, excipient or diluent.

[0039] In another embodiment, provided herein are methods for preventing and/or treating a disease in which the alteration (e.g., increase or decrease) in the expression one, two, three or more protein isoforms encoded by a gene, disclosed in Table 1, infra, is beneficial to the prevention and/or treatment of the disease, the methods comprising administering to a human or non-human subject a compound of Formula (I) or a form thereof, or a pharmaceutical composition comprising a compound of Formula (I) or a form thereof and a pharmaceutically acceptable carrier, excipient or diluent. In a specific embodiment, one, two, three or more RNA isoforms encoded by a gene, disclosed in Table 7, infra, are decreased following administration of a compound of Formula (I) or a form thereof and a pharmaceutically acceptable carrier, excipient or diluent. See the example section for additional information regarding the genes in Table 7. In certain embodiments, a compound of Formula (I) is a compound of Formula (II), Formula (III), Formula (IV), Formula (V), Formula (VI), Formula (VII), Formula (VIII), Formula (IX), Formula (X), Formula (XI), Formula (XII), Formula (XIII), or Formula (XIV) described infra. In some embodiments, a compound of Formula (I) is a compound selected from a compound described herein.

[0040] In another embodiment, provided herein is a method for either preventing, treating or preventing and treating a disease in a subject in which the alteration (e.g., increase or decrease) in the expression one, two, three or more protein isoforms encoded by a gene is beneficial to the prevention and/or treatment of the disease, wherein the gene comprises a DNA nucleotide sequence encoding two exons and an intron, wherein the nucleotide sequence encoding one exon is upstream of the nucleotide sequence encoding the intron and the nucleotide sequence encoding the other exon is downstream of the nucleotide sequence encoding the intron, wherein the DNA nucleotide sequence encoding the intron comprises in 5′ to 3′ order: a nucleotide sequence encoding a first 5′ splice site, a nucleotide sequence encoding a first branch point, a nucleotide sequence encoding a first 3′ splice site, a nucleotide sequence encoding an iREMS, a nucleotide sequence encoding a second branch point and a nucleotide sequence encoding a second 3′ splice site, wherein the iREMS comprises a DNA sequence GAgtrngn (SEQ ID NO: 4), and wherein r is adenine or guanine and n is any nucleotide, the method comprising administering a compound described herein (for example, a compound of Formula (I) or a form thereof or another splicing inducer) to the subject.

[0041] In another embodiment, provided herein is a method for either preventing, treating or preventing and treating a disease in a subject in which the alteration (e.g., increase or decrease) in the expression one, two, three or more protein isoforms encoded by a gene is beneficial to the prevention and/or treatment of the disease, wherein the gene comprises a DNA nucleotide sequence encoding two exons and an intron, wherein the nucleotide sequence encoding one exon is upstream of the nucleotide sequence encoding the intron and the nucleotide sequence encoding the other exon is downstream of the nucleotide sequence encoding the intron, wherein the DNA nucleotide sequence of the intron comprises in 5′ to 3′ order: a nucleotide sequence encoding a first branch point, a nucleotide sequence encoding a first 3′ splice site, and a nucleotide sequence encoding an iREMS, wherein the iREMS comprises a DNA sequence GAgtrngn (SEQ ID NO: 4), and wherein r is adenine or guanine and n is any nucleotide, the method comprising administering a compound described herein (for example, a compound of Formula (I) or a form thereof or another splicing inducer) to the subject.

[0042] In another embodiment, provided herein is a method for either preventing, treating or preventing and treating a disease in a subject in which the alteration (e.g., increase or decrease) in the expression one, two, three or more protein isoforms encoded by a gene is beneficial to the prevention and/or treatment of the disease, wherein the gene comprises a DNA nucleotide sequence encoding two exons and an intron, and wherein the DNA nucleotide sequence comprises exonic and intronic elements illustrated in FIG. 1A, the method comprising administering a compound described herein (for example, a compound of Formula (I) or a form thereof or another splicing inducer) to the subject.

[0043] In another embodiment, provided herein is a method for either preventing, treating or preventing and treating a disease in a subject in which the alteration (e.g., increase or decrease) in the expression one, two, three or more protein isoforms encoded by a gene is beneficial to the prevention and/or treatment of the disease, wherein the gene comprises a DNA nucleotide sequence encoding two exons and an intron, and wherein the DNA nucleotide sequence comprises exonic and intronic elements illustrated in FIG. 1B, the method comprising administering a compound described herein (for example, a compound of Formula (I) or a form thereof or another splicing inducer) to the subject.

[0044] In another embodiment, provided herein is a method for either preventing, treating or preventing and treating a disease in a subject in which the alteration (e.g., increase or decrease) in the expression one, two, three or more protein isoforms encoded by a gene is beneficial to the prevention and/or treatment of the disease, wherein the gene comprises a DNA nucleotide sequence encoding two exons and an intron, and wherein the DNA nucleotide sequence comprises exonic and intronic elements illustrated in FIG. 1C, the method comprising administering a compound described herein (for example, a compound of Formula (I) or a form thereof or another splicing inducer) to the subject.

[0045] In a specific embodiment, the gene is a gene described in a table in this disclosure.

[0046] In another aspect, provided herein are artificial gene constructs. In one embodiment, provided herein is an artificial gene construct comprising endogenous DNA is modified to introduce a non-endogenous nucleotide sequence encoding an intron comprising a 3′ splice site(s) and a branch point(s) and an intronic REMS. In another embodiment, provided herein is an artificial gene construct comprising DNA encoding exons and one, two or more introns, wherein a nucleotide sequence encoding an intronic REMS, functioning as a 5′ splice site in the presence of a compound described herein, which may be upstream of an endogenous nucleotide sequence encoding a branch point and an endogenous nucleotide sequence encoding a 3′ splice site, is modified to introduce a nucleotide sequence encoding a non-endogenous branch point and a non-endogenous 3′ splice site further upstream from the endogenous intronic REMS. In another embodiment, provided herein is an artificial gene construct comprising DNA encoding exons and one, two or more introns, wherein a nucleotide sequence encoding an intronic REMS 5′ splice site, which may be downstream of an endogenous nucleotide sequence encoding a branch point and an endogenous nucleotide sequence encoding a 3′ splice site, is modified to introduce a nucleotide sequence encoding a non-endogenous branch point and a non-endogenous 3′ splice site further downstream from the endogenous intronic REMS. In another embodiment, provided herein is an artificial gene construct comprising DNA encoding an intronic REMS, comprising nucleotides encoding an intronic REMS having one or more 5′ splice site(s), 3′ splice site(s) and branch point(s). In certain embodiments, the artificial gene construct encodes a frameshift or premature stop codon or internal insertions or deletions within the open reading frame. In other embodiments, the artificial gene construct encodes a mature mRNA having a functional open reading frame, producing a novel protein which may or may not be functional. In some embodiments, the artificial gene construct encodes a detectable reporter protein. RNA transcripts having a non-functional open reading frame due to the inclusion of a frameshift, premature stop codon or internal insertions or deletions within the open reading frame can be substrates for nonsense-mediated decay and thus have low abundance. Any intronic REMS-mediated alternative splicing modified RNA transcripts may also have altered stability, altered intracellular transport, altered 3′ end formation efficiency and altered translation efficiency.

[0047] In a specific embodiment, the nucleotide sequence of the intronic REMS introduced into the nucleotide sequence of the artificial gene construct comprises the sequence NNGAgtrngn (SEQ ID NO: 3), wherein r is adenine or guanine and n or N is any nucleotide. In a specific embodiment, in the context of DNA, the nucleotide sequence encoding the intronic REMS comprises a sequence selected from the group consisting of ANGAgtrngn (SEQ ID NO: 1829), CNGAgtrngn (SEQ ID NO: 1835), GNGAgtrngn (SEQ ID NO: 1841), TNGAgtrngn (SEQ ID NO: 1847), NAGAgtrngn (SEQ ID NO: 1830), NCGAgtrngn (SEQ ID NO: 1836), NGGAgtrngn (SEQ ID NO: 1842), NTGAgtrngn (SEQ ID NO: 1848), AAGAgtrngn (SEQ ID NO: 1831), ACGAgtrngn (SEQ ID NO: 1837), AGGAgtrngn (SEQ ID NO: 1843), ATGAgtrngn (SEQ ID NO: 1849), CAGAgtrngn (SEQ ID NO: 1832), CCGAgtrngn (SEQ ID NO: 1838), CGGAgtrngn (SEQ ID NO: 1844), CTGAgtrngn (SEQ ID NO: 1850), GAGAgtrngn (SEQ ID NO: 1833), GCGAgtrngn (SEQ ID NO: 1839), GGGAgtrngn (SEQ ID NO: 1845), GTGAgtrngn (SEQ ID NO: 1851), TAGAgtrngn (SEQ ID NO: 1834), TCGAgtrngn (SEQ ID NO: 1840), TGGAgtrngn (SEQ ID NO: 1846) and TTGAgtrngn (SEQ ID NO: 1852), wherein r is adenine or guanine and n or N is any nucleotide.

[0048] In a further specific embodiment, in the context of DNA, the nucleotide sequence encoding the intronic REMS comprises a sequence selected from the group consisting of ANGAgtragt (SEQ ID NO: 2237), CNGAgtragt (SEQ ID NO: 2243), GNGAgtragt (SEQ ID NO: 2249), TNGAgtragt (SEQ ID NO: 2255), NAGAgtragt (SEQ ID NO: 2238), NCGAgtragt (SEQ ID NO: 2244), NGGAgtragt (SEQ ID NO: 2250), NTGAgtragt (SEQ ID NO: 2256), AAGAgtragt (SEQ ID NO: 2239), ACGAgtragt (SEQ ID NO: 2245), AGGAgtragt (SEQ ID NO: 2251), ATGAgtragt (SEQ ID NO: 2257), CAGAgtragt (SEQ ID NO: 2240), CCGAgtragt (SEQ ID NO: 2246), CGGAgtragt (SEQ ID NO: 2252), CTGAgtragt (SEQ ID NO: 2258), GAGAgtragt (SEQ ID NO: 2241), GCGAgtragt (SEQ ID NO: 2247), GGGAgtragt (SEQ ID NO: 2253), GTGAgtragt (SEQ ID NO: 2259), TAGAgtragt (SEQ ID NO: 2242), TCGAgtragt (SEQ ID NO: 2248), TGGAgtragt (SEQ ID NO: 2254) and TTGAgtragt (SEQ ID NO: 2260), wherein r is adenine or guanine and N is any nucleotide. In one or more embodiments provided herein, N is adenine or guanine. In various specific embodiments, the nucleotide sequence encoding the intronic REMS is a nucleotide sequence encoding a non-endogenous intronic REMS, i.e., a precursor RNA transcript comprising the non-endogenous intronic REMS not naturally found in the DNA sequence of the artificial construct.

[0049] In a specific embodiment, the intronic REMS referred to in a method or artificial gene construct described herein comprises, at the DNA level, a sequence presented in the following table (wherein r is adenine or guanine, and n or N is any nucleotide):

TABLE 14
Intronic REMS DNA sequence (wherein r is adenine or guanine, and n or N
is any nucleotide)

| SEQ ID | | SEQ ID | | SEQ ID | | SEQ ID | |
|---|---|---|---|---|---|---|---|
| NO. | Sequence | NO. | Sequence | NO. | Sequence | NO. | Sequence |
| 1829 | ANGAgtrngn | 1835 | CNGAgtrngn | 1841 | GNGAgtrngn | 1847 | TNGAgtrngn |
| 1830 | NAGAgtrngn | 1836 | NCGAgtrngn | 1842 | NGGAgtrngn | 1848 | NTGAgtrngn |
| 1831 | AAGAgtrngn | 1837 | ACGAgtrngn | 1843 | AGGAgtrngn | 1849 | ATGAgtrngn |
| 1832 | CAGAgtrngn | 1838 | CCGAgtrngn | 1844 | CGGAgtrngn | 1850 | CTGAgtrngn |
| 1833 | GAGAgtrngn | 1839 | GCGAgtrngn | 1845 | GGGAgtrngn | 1851 | GTGAgtrngn |
| 1834 | TAGAgtrngn | 1840 | TCGAgtrngn | 1846 | TGGAgtrngn | 1852 | TTGAgtrngn |
| 1853 | ANGAgtragn | 1877 | ANGAgtrcgn | 1901 | ANGAgtrggn | 1925 | ANGAgtrtgn |
| 1854 | NAGAgtragn | 1878 | NAGAgtrcgn | 1902 | NAGAgtrggn | 1926 | NAGAgtrtgn |
| 1855 | AAGAgtragn | 1879 | AAGAgtrcgn | 1903 | AAGAgtrggn | 1927 | AAGAgtrtgn |
| 1856 | CAGAgtragn | 1880 | CAGAgtrcgn | 1904 | CAGAgtrggn | 1928 | CAGAgtrtgn |
| 1857 | GAGAgtragn | 1881 | GAGAgtrcgn | 1905 | GAGAgtrggn | 1929 | GAGAgtrtgn |
| 1858 | TAGAgtragn | 1882 | TAGAgtregn | 1906 | TAGAgtrggn | 1930 | TAGAgtrtgn |
| 1859 | CNGAgtragn | 1883 | CNGAgtrcgn | 1907 | CNGAgtrggn | 1931 | CNGAgtrtgn |
| 1860 | NCGAgtragn | 1884 | NCGAgtrcgn | 1908 | NCGAgtrggn | 1932 | NCGAgtrtgn |
| 1861 | ACGAgtragn | 1885 | ACGAgtrcgn | 1909 | ACGAgtrggn | 1933 | ACGAgtrtgn |
| 1862 | CCGAgtragn | 1886 | CCGAgtrcgn | 1910 | CCGAgtrggn | 1934 | CCGAgtrtgn |
| 1863 | GCGAgtragn | 1887 | GCGAgtrcgn | 1911 | GCGAgtrggn | 1935 | GCGAgtrtgn |
| 1864 | TCGAgtragn | 1888 | TCGAgtrcgn | 1912 | TCGAgtrggn | 1936 | TCGAgtrtgn |
| 1865 | GNGAgtragn | 1889 | GNGAgtrcgn | 1913 | GNGAgtrggn | 1937 | GNGAgtrtgn |
| 1866 | NGGAgtragn | 1890 | NGGAgtrcgn | 1914 | NGGAgtrggn | 1938 | NGGAgtrtgn |
| 1867 | AGGAgtragn | 1891 | AGGAgtrcgn | 1915 | AGGAgtrggn | 1939 | AGGAgtrtgn |
| 1868 | CGGAgtragn | 1892 | CGGAgtrcgn | 1916 | CGGAgtrggn | 1940 | CGGAgtrtgn |
| 1869 | GGGAgtragn | 1893 | GGGAgtrcgn | 1917 | GGGAgtrggn | 1941 | GGGAgtrtgn |
| 1870 | TGGAgtragn | 1894 | TGGAgtrcgn | 1918 | TGGAgtrggn | 1942 | TGGAgtrtgn |
| 1871 | TNGAgtragn | 1895 | TNGAgtrcgn | 1919 | TNGAgtrggn | 1943 | TNGAgtrtgn |
| 1872 | NTGAgtragn | 1896 | NTGAgtrcgn | 1920 | NTGAgtrggn | 1944 | NTGAgtrtgn |
| 1873 | ATGAgtragn | 1897 | ATGAgtrcgn | 1921 | ATGAgtrggn | 1945 | ATGAgtrtgn |
| 1874 | CTGAgtragn | 1898 | CTGAgtregn | 1922 | CTGAgtrggn | 1946 | CTGAgtrtgn |
| 1875 | GTGAgtragn | 1899 | GTGAgtrcgn | 1923 | GTGAgtrggn | 1947 | GTGAgtrtgn |
| 1876 | TTGAgtragn | 1900 | TTGAgtrcgn | 1924 | TTGAgtrggn | 1948 | TTGAgtrtgn |
| 1949 | ANGAgtraga | 1973 | ANGAgtrcga | 1997 | ANGAgtrgga | 2021 | ANGAgtrtga |
| 1950 | NAGAgtraga | 1974 | NAGAgtrcga | 1998 | NAGAgtrgga | 2022 | NAGAgtrtga |
| 1951 | AAGAgtraga | 1975 | AAGAgtrcga | 1999 | AAGAgtrgga | 2023 | AAGAgtrtga |
| 1952 | CAGAgtraga | 1976 | CAGAgtrcga | 2000 | CAGAgtrgga | 2024 | CAGAgtrtga |
| 1953 | GAGAgtraga | 1977 | GAGAgtrcga | 2001 | GAGAgtrgga | 2025 | GAGAgtrtga |
| 1954 | TAGAgtraga | 1978 | TAGAgtrcga | 2002 | TAGAgtrgga | 2026 | TAGAgtrtga |
| 1955 | CNGAgtraga | 1979 | CNGAgtrcga | 2003 | CNGAgtrgga | 2027 | CNGAgtrtga |
| 1956 | NCGAgtraga | 1980 | NCGAgtrcga | 2004 | NCGAgtrgga | 2028 | NCGAgtrtga |
| 1957 | ACGAgtraga | 1981 | ACGAgtrcga | 2005 | ACGAgtrgga | 2029 | ACGAgtrtga |
| 1958 | CCGAgtraga | 1982 | CCGAgtrcga | 2006 | CCGAgtrgga | 2030 | CCGAgtrtga |
| 1959 | GCGAgtraga | 1983 | GCGAgtrcga | 2007 | GCGAgtrgga | 2031 | GCGAgtrtga |
| 1960 | TCGAgtraga | 1984 | TCGAgtrcga | 2008 | TCGAgtrgga | 2032 | TCGAgtrtga |
| 1961 | GNGAgtraga | 1985 | GNGAgtrcga | 2009 | GNGAgtrgga | 2033 | GNGAgtrtga |
| 1962 | NGGAgtraga | 1986 | NGGAgtrcga | 2010 | NGGAgtrgga | 2034 | NGGAgtrtga |
| 1963 | AGGAgtraga | 1987 | AGGAgtrcga | 2011 | AGGAgtrgga | 2035 | AGGAgtrtga |
| 1964 | CGGAgtraga | 1988 | CGGAgtrcga | 2012 | CGGAgtrgga | 2036 | CGGAgtrtga |
| 1965 | GGGAgtraga | 1989 | GGGAgtrcga | 2013 | GGGAgtrgga | 2037 | GGGAgtrtga |
| 1966 | TGGAgtraga | 1990 | TGGAgtrcga | 2014 | TGGAgtrgga | 2038 | TGGAgtrtga |
| 1967 | TNGAgtraga | 1991 | TNGAgtrcga | 2015 | TNGAgtrgga | 2039 | TNGAgtrtga |
| 1968 | NTGAgtraga | 1992 | NTGAgtrcga | 2016 | NTGAgtrgga | 2040 | NTGAgtrtga |
| 1969 | ATGAgtraga | 1993 | ATGAgtrcga | 2017 | ATGAgtrgga | 2041 | ATGAgtrtga |
| 1970 | CTGAgtraga | 1994 | CTGAgtrcga | 2018 | CTGAgtrgga | 2042 | CTGAgtrtga |
| 1971 | GTGAgtraga | 1995 | GTGAgtrcga | 2019 | GTGAgtrgga | 2043 | GTGAgtrtga |
| 1972 | TTGAgtraga | 1996 | TTGAgtrcga | 2020 | TTGAgtrgga | 2044 | TTGAgtrtga |
| 2045 | ANGAgtragc | 2069 | ANGAgtrcgc | 2093 | ANGAgtrggc | 2117 | ANGAgtrtgc |
| 2046 | NAGAgtragc | 2070 | NAGAgtrcgc | 2094 | NAGAgtrggc | 2118 | NAGAgtrtgc |
| 2047 | AAGAgtragc | 2071 | AAGAgtrcgc | 2095 | AAGAgtrggc | 2119 | AAGAgtrtgc |
| 2048 | CAGAgtragc | 2072 | CAGAgtrcgc | 2096 | CAGAgtrggc | 2120 | CAGAgtrtgc |
| 2049 | GAGAgtragc | 2073 | GAGAgtrcgc | 2097 | GAGAgtrggc | 2121 | GAGAgtrtgc |
| 2050 | TAGAgtragc | 2074 | TAGAgtrcgc | 2098 | TAGAgtrggc | 2122 | TAGAgtrtgc |
| 2051 | CNGAgtragc | 2075 | CNGAgtrcgc | 2099 | CNGAgtrggc | 2123 | CNGAgtrtgc |
| 2052 | NCGAgtragc | 2076 | NCGAgtrcgc | 2100 | NCGAgtrggc | 2124 | NCGAgtrtgc |
| 2053 | ACGAgtragc | 2077 | ACGAgtrcgc | 2101 | ACGAgtrggc | 2125 | ACGAgtrtgc |
| 2054 | CCGAgtragc | 2078 | CCGAgtrcgc | 2102 | CCGAgtrggc | 2126 | CCGAgtrtgc |
| 2055 | GCGAgtragc | 2079 | GCGAgtrcgc | 2103 | GCGAgtrggc | 2127 | GCGAgtrtgc |
| 2056 | TCGAgtragc | 2080 | TCGAgtrcgc | 2104 | TCGAgtrggc | 2128 | TCGAgtrtgc |
| 2057 | GNGAgtragc | 2081 | GNGAgtrcgc | 2105 | GNGAgtrggc | 2129 | GNGAgtrtgc |
| 2058 | NGGAgtragc | 2082 | NGGAgtrcgc | 2106 | NGGAgtrggc | 2130 | NGGAgtrtgc |
| 2059 | AGGAgtragc | 2083 | AGGAgtrcgc | 2107 | AGGAgtrggc | 2131 | AGGAgtrtgc |
| 2060 | CGGAgtragc | 2084 | CGGAgtrcgc | 2108 | CGGAgtrggc | 2132 | CGGAgtrtgc |
| 2061 | GGGAgtragc | 2085 | GGGAgtrcgc | 2109 | GGGAgtrggc | 2133 | GGGAgtrtgc |
| 2062 | TGGAgtragc | 2086 | TGGAgtrcgc | 2110 | TGGAgtrggc | 2134 | TGGAgtrtgc |
| 2063 | TNGAgtragc | 2087 | TNGAgtrcgc | 2111 | TNGAgtrggc | 2135 | TNGAgtrtgc |
| 2064 | NTGAgtragc | 2088 | NTGAgtrcgc | 2112 | NTGAgtrggc | 2136 | NTGAgtrtgc |
| 2065 | ATGAgtragc | 2089 | ATGAgtrcgc | 2113 | ATGAgtrggc | 2137 | ATGAgtrtgc |
| 2066 | CTGAgtragc | 2090 | CTGAgtrcgc | 2114 | CTGAgtrggc | 2138 | CTGAgtrtgc |
| 2067 | GTGAgtragc | 2091 | GTGAgtrcgc | 2115 | GTGAgtrggc | 2139 | GTGAgtrtgc |
| 2068 | TTGAgtragc | 2092 | TTGAgtrcgc | 2116 | TTGAgtrggc | 2140 | TTGAgtrtgc |
| 2141 | ANGAgtragg | 2165 | ANGAgtrcgg | 2189 | ANGAgtrggg | 2213 | ANGAgtrtgg |
| 2142 | NAGAgtragg | 2166 | NAGAgtrcgg | 2190 | NAGAgtrggg | 2214 | NAGAgtrtgg |
| 2143 | AAGAgtragg | 2167 | AAGAgtrcgg | 2191 | AAGAgtrggg | 2215 | AAGAgtrtgg |
| 2144 | CAGAgtragg | 2168 | CAGAgtrcgg | 2192 | CAGAgtrggg | 2216 | CAGAgtrtgg |
| 2145 | GAGAgtragg | 2169 | GAGAgtrcgg | 2193 | GAGAgtrggg | 2217 | GAGAgtrtgg |
| 2146 | TAGAgtragg | 2170 | TAGAgtrcgg | 2194 | TAGAgtrggg | 2218 | TAGAgtrtgg |
| 2147 | CNGAgtragg | 2171 | CNGAgtrcgg | 2195 | CNGAgtrggg | 2219 | CNGAgtrtgg |
| 2148 | NCGAgtragg | 2172 | NCGAgtrcgg | 2196 | NCGAgtrggg | 2220 | NCGAgtrtgg |
| 2149 | ACGAgtragg | 2173 | ACGAgtrcgg | 2197 | ACGAgtrggg | 2221 | ACGAgtrtgg |
| 2150 | CCGAgtragg | 2174 | CCGAgtrcgg | 2198 | CCGAgtrggg | 2222 | CCGAgtrtgg |
| 2151 | GCGAgtragg | 2175 | GCGAgtrcgg | 2199 | GCGAgtrggg | 2223 | GCGAgtrtgg |
| 2152 | TCGAgtragg | 2176 | TCGAgtrcgg | 2200 | TCGAgtrggg | 2224 | TCGAgtrtgg |
| 2153 | GNGAgtragg | 2177 | GNGAgtrcgg | 2201 | GNGAgtrggg | 2225 | GNGAgtrtgg |
| 2154 | NGGAgtragg | 2178 | NGGAgtrcgg | 2202 | NGGAgtrggg | 2226 | NGGAgtrtgg |
| 2155 | AGGAgtragg | 2179 | AGGAgtrcgg | 2203 | AGGAgtrggg | 2227 | AGGAgtrtgg |
| 2156 | CGGAgtragg | 2180 | CGGAgtrcgg | 2204 | CGGAgtrggg | 2228 | CGGAgtrtgg |
| 2157 | GGGAgtragg | 2181 | GGGAgtrcgg | 2205 | GGGAgtrggg | 2229 | GGGAgtrtgg |
| 2158 | TGGAgtragg | 2182 | TGGAgtrcgg | 2206 | TGGAgtrggg | 2230 | TGGAgtrtgg |
| 2159 | TNGAgtragg | 2183 | TNGAgtrcgg | 2207 | TNGAgtrggg | 2231 | TNGAgtrtgg |
| 2160 | NTGAgtragg | 2184 | NTGAgtrcgg | 2208 | NTGAgtrggg | 2232 | NTGAgtrtgg |
| 2161 | ATGAgtragg | 2185 | ATGAgtrcgg | 2209 | ATGAgtrggg | 2233 | ATGAgtrtgg |
| 2162 | CTGAgtragg | 2186 | CTGAgtrcgg | 2210 | CTGAgtrggg | 2234 | CTGAgtrtgg |
| 2163 | GTGAgtragg | 2187 | GTGAgtrcgg | 2211 | GTGAgtrggg | 2235 | GTGAgtrtgg |
| 2164 | TTGAgtragg | 2188 | TTGAgtrcgg | 2212 | TTGAgtrggg | 2236 | TTGAgtrtgg |
| 2237 | ANGAgtragt | 2261 | ANGAgtrcgt | 2285 | ANGAgtrggt | 2309 | ANGAgtrtgt |
| 2238 | NAGAgtragt | 2262 | NAGAgtrcgt | 2286 | NAGAgtrggt | 2310 | NAGAgtrtgt |
| 2239 | AAGAgtragt | 2263 | AAGAgtrcgt | 2287 | AAGAgtrggt | 2311 | AAGAgtrtgt |
| 2240 | CAGAgtragt | 2264 | CAGAgtrcgt | 2288 | CAGAgtrggt | 2312 | CAGAgtrtgt |
| 2241 | GAGAgtragt | 2265 | GAGAgtrcgt | 2289 | GAGAgtrggt | 2313 | GAGAgtrtgt |
| 2242 | TAGAgtragt | 2266 | TAGAgtrcgt | 2290 | TAGAgtrggt | 2314 | TAGAgtrtgt |
| 2243 | CNGAgtragt | 2267 | CNGAgtrcgt | 2291 | CNGAgtrggt | 2315 | CNGAgtrtgt |
| 2244 | NCGAgtragt | 2268 | NCGAgtrcgt | 2292 | NCGAgtrggt | 2316 | NCGAgtrtgt |
| 2245 | ACGAgtragt | 2269 | ACGAgtrcgt | 2293 | ACGAgtrggt | 2317 | ACGAgtrtgt |
| 2246 | CCGAgtragt | 2270 | CCGAgtrcgt | 2294 | CCGAgtrggt | 2318 | CCGAgtrtgt |
| 2247 | GCGAgtragt | 2271 | GCGAgtrcgt | 2295 | GCGAgtrggt | 2319 | GCGAgtrtgt |
| 2248 | TCGAgtragt | 2272 | TCGAgtrcgt | 2296 | TCGAgtrggt | 2320 | TCGAgtrtgt |
| 2249 | GNGAgtragt | 2273 | GNGAgtrcgt | 2297 | GNGAgtrggt | 2321 | GNGAgtrtgt |
| 2250 | NGGAgtragt | 2274 | NGGAgtregt | 2298 | NGGAgtrggt | 2322 | NGGAgtrtgt |
| 2251 | AGGAgtragt | 2275 | AGGAgtrcgt | 2299 | AGGAgtrggt | 2323 | AGGAgtrtgt |
| 2252 | CGGAgtragt | 2276 | CGGAgtrcgt | 2300 | CGGAgtrggt | 2324 | CGGAgtrtgt |
| 2253 | GGGAgtragt | 2277 | GGGAgtrcgt | 2301 | GGGAgtrggt | 2325 | GGGAgtrtgt |
| 2254 | TGGAgtragt | 2278 | TGGAgtrcgt | 2302 | TGGAgtrggt | 2326 | TGGAgtrtgt |
| 2255 | TNGAgtragt | 2279 | TNGAgtrcgt | 2303 | TNGAgtrggt | 2327 | TNGAgtrtgt |
| 2256 | NTGAgtragt | 2280 | NTGAgtrcgt | 2304 | NTGAgtrggt | 2328 | NTGAgtrtgt |
| 2257 | ATGAgtragt | 2281 | ATGAgtrcgt | 2305 | ATGAgtrggt | 2329 | ATGAgtrtgt |
| 2258 | CTGAgtragt | 2282 | CTGAgtrcgt | 2306 | CTGAgtrggt | 2330 | CTGAgtrtgt |
| 2259 | GTGAgtragt | 2283 | GTGAgtrcgt | 2307 | GTGAgtrggt | 2331 | GTGAgtrtgt |
| 2260 | TTGAgtragt | 2284 | TTGAgtrcgt | 2308 | TTGAgtrggt | 2332 | TTGAgtrtgt |
| 2333 | ANGAgtrnga | 2357 | ANGAgtrngc | 2381 | ANGAgtrngg | 2405 | ANGAgtrngt |
| 2334 | NAGAgtrnga | 2358 | NAGAgtrngc | 2382 | NAGAgtrngg | 2406 | NAGAgtrngt |
| 2335 | AAGAgtrnga | 2359 | AAGAgtrngc | 2383 | AAGAgtrngg | 2407 | AAGAgtrngt |
| 2336 | CAGAgtrnga | 2360 | CAGAgtrngc | 2384 | CAGAgtrngg | 2408 | CAGAgtrngt |
| 2337 | GAGAgtrnga | 2361 | GAGAgtrngc | 2385 | GAGAgtrngg | 2409 | GAGAgtrngt |
| 2338 | TAGAgtrnga | 2362 | TAGAgtrngc | 2386 | TAGAgtrngg | 2410 | TAGAgtrngt |
| 2339 | CNGAgtrnga | 2363 | CNGAgtrngc | 2387 | CNGAgtrngg | 2411 | CNGAgtrngt |
| 2340 | NCGAgtrnga | 2364 | NCGAgtrngc | 2388 | NCGAgtrngg | 2412 | NCGAgtrngt |
| 2341 | ACGAgtrnga | 2365 | ACGAgtrngc | 2389 | ACGAgtrngg | 2413 | ACGAgtrngt |
| 2342 | CCGAgtrnga | 2366 | CCGAgtrngc | 2390 | CCGAgtrngg | 2414 | CCGAgtrngt |
| 2343 | GCGAgtrnga | 2367 | GCGAgtrngc | 2391 | GCGAgtrngg | 2415 | GCGAgtrngt |
| 2344 | TCGAgtrnga | 2368 | TCGAgtrngc | 2392 | TCGAgtrngg | 2416 | TCGAgtrngt |
| 2345 | GNGAgtrnga | 2369 | GNGAgtrngc | 2393 | GNGAgtrngg | 2417 | GNGAgtrngt |
| 2346 | NGGAgtrnga | 2370 | NGGAgtrngc | 2394 | NGGAgtrngg | 2418 | NGGAgtrngt |
| 2347 | AGGAgtrnga | 2371 | AGGAgtrngc | 2395 | AGGAgtrngg | 2419 | AGGAgtrngt |
| 2348 | CGGAgtrnga | 2372 | CGGAgtrngc | 2396 | CGGAgtrngg | 2420 | CGGAgtrngt |
| 2349 | GGGAgtrnga | 2373 | GGGAgtrngc | 2397 | GGGAgtrngg | 2421 | GGGAgtrngt |
| 2350 | TGGAgtrnga | 2374 | TGGAgtrngc | 2398 | TGGAgtrngg | 2422 | TGGAgtrngt |
| 2351 | TNGAgtrnga | 2375 | TNGAgtrngc | 2399 | TNGAgtrngg | 2423 | TNGAgtrngt |
| 2352 | NTGAgtrnga | 2376 | NTGAgtrngc | 2400 | NTGAgtrngg | 2424 | NTGAgtrngt |
| 2353 | ATGAgtrnga | 2377 | ATGAgtrngc | 2401 | ATGAgtrngg | 2425 | ATGAgtrngt |
| 2354 | CTGAgtrnga | 2378 | CTGAgtrngc | 2402 | CTGAgtrngg | 2426 | CTGAgtrngt |
| 2355 | GTGAgtrnga | 2379 | GTGAgtrngc | 2403 | GTGAgtrngg | 2427 | GTGAgtrngt |
| 2356 | TTGAgtrnga | 2380 | TTGAgtrngc | 2404 | TTGAgtrngg | 2428 | TTGAgtrngt |
| 2429 | ANGAgtangn | 2453 | ANGAgtaagn | 2477 | ANGAgtacgn | 2501 | ANGAgtaggn |
| 2430 | NAGAglangn | 2454 | NAGAgtaagn | 2478 | NAGAgtacgn | 2502 | NAGAgtaggn |
| 2431 | AAGAgtangn | 2455 | AAGAgtaagn | 2479 | AAGAgtacgn | 2503 | AAGAgtaggn |
| 2432 | CAGAgtangn | 2456 | CAGAgtaagn | 2480 | CAGAgtacgn | 2504 | CAGAgtaggn |
| 2433 | GAGAgtangn | 2457 | GAGAgtaagn | 2481 | GAGAgtacgn | 2505 | GAGAgtaggn |
| 2434 | TAGAgtangn | 2458 | TAGAgtaagn | 2482 | TAGAgtacgn | 2506 | TAGAgtaggn |
| 2435 | CNGAgtangn | 2459 | CNGAgtaagn | 2483 | CNGAgtacgn | 2507 | CNGAgtaggn |
| 2436 | NCGAgtangn | 2460 | NCGAgtaagn | 2484 | NCGAgtacgn | 2508 | NCGAgtaggn |
| 2437 | ACGAgtangn | 2461 | ACGAgtaagn | 2485 | ACGAgtacgn | 2509 | ACGAgtaggn |
| 2438 | CCGAgtangn | 2462 | CCGAgtaagn | 2486 | CCGAgtacgn | 2510 | CCGAgtaggn |
| 2439 | GCGAgtangn | 2463 | GCGAgtaagn | 2487 | GCGAgtacgn | 2511 | GCGAgtaggn |
| 2440 | TCGAgtangn | 2464 | TCGAgtaagn | 2488 | TCGAgtacgn | 2512 | TCGAgtaggn |
| 2441 | GNGAgtangn | 2465 | GNGAgtaagn | 2489 | GNGAgtacgn | 2513 | GNGAgtaggn |
| 2442 | NGGAgtangn | 2466 | NGGAgtaagn | 2490 | NGGAgtacgn | 2514 | NGGAgtaggn |
| 2443 | AGGAgtangn | 2467 | AGGAgtaagn | 2491 | AGGAgtacgn | 2515 | AGGAgtaggn |
| 2444 | CGGAgtangn | 2468 | CGGAgtaagn | 2492 | CGGAgtacgn | 2516 | CGGAgtaggn |
| 2445 | GGGAgtangn | 2469 | GGGAgtaagn | 2493 | GGGAgtacgn | 2517 | GGGAgtaggn |
| 2446 | TGGAgtangn | 2470 | TGGAgtaagn | 2494 | TGGAgtacgn | 2518 | TGGAgtaggn |
| 2447 | TNGAgtangn | 2471 | TNGAgtaagn | 2495 | TNGAgtacgn | 2519 | TNGAgtaggn |
| 2448 | NTGAgtangn | 2472 | NTGAgtaagn | 2496 | NTGAgtacgn | 2520 | NTGAgtaggn |
| 2449 | ATGAgtangn | 2473 | ATGAgtaagn | 2497 | ATGAgtacgn | 2521 | ATGAgtaggn |
| 2450 | CTGAgtangn | 2474 | CTGAgtaagn | 2498 | CTGAgtacgn | 2522 | CTGAgtaggn |
| 2451 | GTGAgtangn | 2475 | GTGAgtaagn | 2499 | GTGAgtacgn | 2523 | GTGAgtaggn |
| 2452 | TTGAgtangn | 2476 | TTGAgtaagn | 2500 | TTGAgtacgn | 2524 | TTGAgtaggn |
| 2525 | ANGAgtatgn | 2549 | ANGAgtaaga | 2573 | ANGAgtacga | 2597 | ANGAgtagga |
| 2526 | NAGAgtatgn | 2550 | NAGAgtaaga | 2574 | NAGAgtacga | 2598 | NAGAgtagga |
| 2527 | AAGAgtatgn | 2551 | AAGAgtaaga | 2575 | AAGAgtacga | 2599 | AAGAgtagga |
| 2528 | CAGAgtatgn | 2552 | CAGAgtaaga | 2576 | CAGAgtacga | 2600 | CAGAgtagga |
| 2529 | GAGAgtatgn | 2553 | GAGAgtaaga | 2577 | GAGAgtacga | 2601 | GAGAgtagga |
| 2530 | TAGAgtatgn | 2554 | TAGAgtaaga | 2578 | TAGAgtacga | 2602 | TAGAgtagga |
| 2531 | CNGAgtatgn | 2555 | CNGAgtaaga | 2579 | CNGAgtacga | 2603 | CNGAgtagga |
| 2532 | NCGAgtatgn | 2556 | NCGAgtaaga | 2580 | NCGAgtacga | 2604 | NCGAgtagga |
| 2533 | ACGAgtatgn | 2557 | ACGAgtaaga | 2581 | ACGAgtacga | 2605 | ACGAgtagga |
| 2534 | CCGAgtatgn | 2558 | CCGAgtaaga | 2582 | CCGAgtacga | 2606 | CCGAgtagga |
| 2535 | GCGAgtatgn | 2559 | GCGAgtaaga | 2583 | GCGAgtacga | 2607 | GCGAgtagga |
| 2536 | TCGAgtatgn | 2560 | TCGAgtaaga | 2584 | TCGAgtacga | 2608 | TCGAgtagga |
| 2537 | GNGAgtatgn | 2561 | GNGAgtaaga | 2585 | GNGAgtacga | 2609 | GNGAgtagga |
| 2538 | NGGAgtatgn | 2562 | NGGAgtaaga | 2586 | NGGAgtacga | 2610 | NGGAgtagga |
| 2539 | AGGAgtatgn | 2563 | AGGAgtaaga | 2587 | AGGAgtacga | 2611 | AGGAgtagga |
| 2540 | CGGAgtatgn | 2564 | CGGAgtaaga | 2588 | CGGAgtacga | 2612 | CGGAgtagga |
| 2541 | GGGAgtatgn | 2565 | GGGAgtaaga | 2589 | GGGAgtacga | 2613 | GGGAgtagga |
| 2542 | TGGAgtatgn | 2566 | TGGAgtaaga | 2590 | TGGAgtacga | 2614 | TGGAgtagga |
| 2543 | TNGAgtatgn | 2567 | TNGAgtaaga | 2591 | TNGAgtacga | 2615 | TNGAgtagga |
| 2544 | NTGAgtatgn | 2568 | NTGAgtaaga | 2592 | NTGAgtacga | 2616 | NTGAgtagga |
| 2545 | ATGAgtatgn | 2569 | ATGAgtaaga | 2593 | ATGAgtacga | 2617 | ATGAgtagga |
| 2546 | CTGAgtatgn | 2570 | CTGAgtaaga | 2594 | CTGAgtacga | 2618 | CTGAgtagga |
| 2547 | GTGAgtatgn | 2571 | GTGAgtaaga | 2595 | GTGAgtacga | 2619 | GTGAgtagga |
| 2548 | TTGAgtatgn | 2572 | TTGAgtaaga | 2596 | TTGAgtacga | 2620 | TTGAgtagga |
| 2621 | ANGAgtatga | 2645 | ANGAgtaagc | 2669 | ANGAgtacgc | 2693 | ANGAgtaggc |
| 2622 | NAGAgtatga | 2646 | NAGAgtaagc | 2670 | NAGAgtacgc | 2694 | NAGAgtaggc |
| 2623 | AAGAgtatga | 2647 | AAGAgtaagc | 2671 | AAGAgtacgc | 2695 | AAGAgtaggc |
| 2624 | CAGAgtatga | 2648 | CAGAgtaagc | 2672 | CAGAgtacgc | 2696 | CAGAgtaggc |
| 2625 | GAGAgtatga | 2649 | GAGAgtaagc | 2673 | GAGAgtacgc | 2697 | GAGAgtaggc |
| 2626 | TAGAgtatga | 2650 | TAGAgtaagc | 2674 | TAGAgtacgc | 2698 | TAGAgtaggc |
| 2627 | CNGAgtatga | 2651 | CNGAgtaagc | 2675 | CNGAgtacgc | 2699 | CNGAgtaggc |
| 2628 | NCGAgtatga | 2652 | NCGAgtaagc | 2676 | NCGAgtacgc | 2700 | NCGAgtaggc |
| 2629 | ACGAgtatga | 2653 | ACGAgtaagc | 2677 | ACGAgtacgc | 2701 | ACGAgtaggc |
| 2630 | CCGAgtatga | 2654 | CCGAgtaagc | 2678 | CCGAgtacgc | 2702 | CCGAgtaggc |
| 2631 | GCGAgtatga | 2655 | GCGAgtaagc | 2679 | GCGAgtacgc | 2703 | GCGAgtaggc |
| 2632 | TCGAgtatga | 2656 | TCGAgtaagc | 2680 | TCGAgtacgc | 2704 | TCGAgtaggc |
| 2633 | GNGAgtatga | 2657 | GNGAgtaagc | 2681 | GNGAgtacgc | 2705 | GNGAgtaggc |
| 2634 | NGGAgtatga | 2658 | NGGAgtaagc | 2682 | NGGAgtacgc | 2706 | NGGAgtaggc |
| 2635 | AGGAgtatga | 2659 | AGGAgtaagc | 2683 | AGGAgtacgc | 2707 | AGGAgtaggc |
| 2636 | CGGAgtatga | 2660 | CGGAgtaagc | 2684 | CGGAgtacgc | 2708 | CGGAgtaggc |
| 2637 | GGGAgtatga | 2661 | GGGAgtaagc | 2685 | GGGAgtacgc | 2709 | GGGAgtaggc |
| 2638 | TGGAgtatga | 2662 | TGGAgtaagc | 2686 | TGGAgtacgc | 2710 | TGGAgtaggc |
| 2639 | TNGAgtatga | 2663 | TNGAgtaagc | 2687 | TNGAgtacgc | 2711 | TNGAgtaggc |
| 2640 | NTGAgtatga | 2664 | NTGAgtaagc | 2688 | NTGAgtacgc | 2712 | NTGAgtaggc |
| 2641 | ATGAgtatga | 2665 | ATGAgtaagc | 2689 | ATGAgtacgc | 2713 | ATGAgtaggc |
| 2642 | CTGAgtatga | 2666 | CTGAgtaagc | 2690 | CTGAgtacgc | 2714 | CTGAgtaggc |
| 2643 | GTGAgtatga | 2667 | GTGAgtaagc | 2691 | GTGAgtacgc | 2715 | GTGAgtaggc |
| 2644 | TTGAgtatga | 2668 | TTGAgtaagc | 2692 | TTGAgtacgc | 2716 | TTGAgtaggc |
| 2717 | ANGAgtatgc | 2741 | ANGAgtaagg | 2765 | ANGAgtacgg | 2789 | ANGAgtaggg |
| 2718 | NAGAgtatgc | 2742 | NAGAgtaagg | 2766 | NAGAgtacgg | 2790 | NAGAgtaggg |
| 2719 | AAGAgtatgc | 2743 | AAGAgtaagg | 2767 | AAGAgtacgg | 2791 | AAGAgtaggg |
| 2720 | CAGAgtatgc | 2744 | CAGAgtaagg | 2768 | CAGAgtacgg | 2792 | CAGAgtaggg |
| 2721 | GAGAgtatgc | 2745 | GAGAgtaagg | 2769 | GAGAgtacgg | 2793 | GAGAgtaggg |
| 2722 | TAGAgtatgc | 2746 | TAGAgtaagg | 2770 | TAGAgtacgg | 2794 | TAGAgtaggg |
| 2723 | CNGAgtatgc | 2747 | CNGAgtaagg | 2771 | CNGAgtacgg | 2795 | CNGAgtaggg |
| 2724 | NCGAgtatgc | 2748 | NCGAgtaagg | 2772 | NCGAgtacgg | 2796 | NCGAgtaggg |
| 2725 | ACGAgtatgc | 2749 | ACGAgtaagg | 2773 | ACGAgtacgg | 2797 | ACGAgtaggg |
| 2726 | CCGAgtatgc | 2750 | CCGAgtaagg | 2774 | CCGAgtacgg | 2798 | CCGAgtaggg |
| 2727 | GCGAgtatgc | 2751 | GCGAgtaagg | 2775 | GCGAgtacgg | 2799 | GCGAgtaggg |
| 2728 | TCGAgtatgc | 2752 | TCGAgtaagg | 2776 | TCGAgtacgg | 2800 | TCGAgtaggg |
| 2729 | GNGAgtatgc | 2753 | GNGAgtaagg | 2777 | GNGAgtacgg | 2801 | GNGAgtaggg |
| 2730 | NGGAgtatgc | 2754 | NGGAgtaagg | 2778 | NGGAgtacgg | 2802 | NGGAgtaggg |
| 2731 | AGGAgtatgc | 2755 | AGGAgtaagg | 2779 | AGGAgtacgg | 2803 | AGGAgtaggg |
| 2732 | CGGAgtatgc | 2756 | CGGAgtaagg | 2780 | CGGAgtacgg | 2804 | CGGAgtaggg |
| 2733 | GGGAgtatgc | 2757 | GGGAgtaagg | 2781 | GGGAgtacgg | 2805 | GGGAgtaggg |
| 2734 | TGGAgtatgc | 2758 | TGGAgtaagg | 2782 | TGGAgtacgg | 2806 | TGGAgtaggg |
| 2735 | TNGAgtatgc | 2759 | TNGAgtaagg | 2783 | TNGAgtacgg | 2807 | TNGAgtaggg |
| 2736 | NTGAgtatgc | 2760 | NTGAgtaagg | 2784 | NTGAgtacgg | 2808 | NTGAgtaggg |
| 2737 | ATGAgtatgc | 2761 | ATGAgtaagg | 2785 | ATGAgtacgg | 2809 | ATGAgtaggg |
| 2738 | CTGAgtatgc | 2762 | CTGAgtaagg | 2786 | CTGAgtacgg | 2810 | CTGAgtaggg |
| 2739 | GTGAgtatgc | 2763 | GTGAgtaagg | 2787 | GTGAgtacgg | 2811 | GTGAgtaggg |
| 2740 | TTGAgtatgc | 2764 | TTGAgtaagg | 2788 | TTGAgtacgg | 2812 | TTGAgtaggg |
| 2813 | ANGAgtatgg | 2837 | ANGAgtaagt | 2861 | ANGAgtacgt | 2885 | ANGAgtaggt |
| 2814 | NAGAgtatgg | 2838 | NAGAgtaagt | 2862 | NAGAgtacgt | 2886 | NAGAgtaggt |
| 2815 | AAGAgtatgg | 2839 | AAGAgtaagt | 2863 | AAGAgtacgt | 2887 | AAGAgtaggt |
| 2816 | CAGAgtatgg | 2840 | CAGAgtaagt | 2864 | CAGAgtacgt | 2888 | CAGAgtaggt |
| 2817 | GAGAgtatgg | 2841 | GAGAgtaagt | 2865 | GAGAgtacgt | 2889 | GAGAgtaggt |
| 2818 | TAGAgtatgg | 2842 | TAGAgtaagt | 2866 | TAGAgtacgt | 2890 | TAGAgtaggt |
| 2819 | CNGAgtatgg | 2843 | CNGAgtaagt | 2867 | CNGAgtacgt | 2891 | CNGAgtaggt |
| 2820 | NCGAgtatgg | 2844 | NCGAgtaagt | 2868 | NCGAgtacgt | 2892 | NCGAgtaggt |
| 2821 | ACGAgtatgg | 2845 | ACGAgtaagt | 2869 | ACGAgtacgt | 2893 | ACGAgtaggt |
| 2822 | CCGAgtatgg | 2846 | CCGAgtaagt | 2870 | CCGAgtacgt | 2894 | CCGAgtaggt |
| 2823 | GCGAgtatgg | 2847 | GCGAgtaagt | 2871 | GCGAgtacgt | 2895 | GCGAgtaggt |
| 2824 | TCGAgtatgg | 2848 | TCGAgtaagt | 2872 | TCGAgtacgt | 2896 | TCGAgtaggt |
| 2825 | GNGAgtatgg | 2849 | GNGAgtaagt | 2873 | GNGAgtacgt | 2897 | GNGAgtaggt |
| 2826 | NGGAgtatgg | 2850 | NGGAgtaagt | 2874 | NGGAgtacgt | 2898 | NGGAgtaggt |
| 2827 | AGGAgtatgg | 2851 | AGGAgtaagt | 2875 | AGGAgtacgt | 2899 | AGGAgtaggt |
| 2828 | CGGAgtatgg | 2852 | CGGAgtaagt | 2876 | CGGAgtacgt | 2900 | CGGAgtaggt |
| 2829 | GGGAgtatgg | 2853 | GGGAgtaagt | 2877 | GGGAgtacgt | 2901 | GGGAgtaggt |
| 2830 | TGGAgtatgg | 2854 | TGGAgtaagt | 2878 | TGGAgtacgt | 2902 | TGGAgtaggt |
| 2831 | TNGAgtatgg | 2855 | TNGAgtaagt | 2879 | TNGAgtacgt | 2903 | TNGAgtaggt |
| 2832 | NTGAgtatgg | 2856 | NTGAgtaagt | 2880 | NTGAgtacgt | 2904 | NTGAgtaggt |
| 2833 | ATGAgtatgg | 2857 | ATGAgtaagt | 2881 | ATGAgtacgt | 2905 | ATGAgtaggt |
| 2834 | CTGAgtatgg | 2858 | CTGAgtaagt | 2882 | CTGAgtacgt | 2906 | CTGAgtaggt |
| 2835 | GTGAgtatgg | 2859 | GTGAgtaagt | 2883 | GTGAgtacgt | 2907 | GTGAgtaggt |
| 2836 | TTGAgtatgg | 2860 | TTGAgtaagt | 2884 | TTGAgtacgt | 2908 | TTGAgtaggt |
| 2909 | ANGAgtatgt | 2933 | ANGAgtanga | 2957 | ANGAgtangc | 2981 | ANGAgtangg |
| 2910 | NAGAgtatgt | 2934 | NAGAgtanga | 2958 | NAGAgtangc | 2982 | NAGAgtangg |
| 2911 | AAGAgtatgt | 2935 | AAGAgtanga | 2959 | AAGAgtangc | 2983 | AAGAgtangg |
| 2912 | CAGAgtatgt | 2936 | CAGAgtanga | 2960 | CAGAgtangc | 2984 | CAGAgtangg |
| 2913 | GAGAgtatgt | 2937 | GAGAgtanga | 2961 | GAGAgtangc | 2985 | GAGAgtangg |
| 2914 | TAGAgtatgt | 2938 | TAGAgtanga | 2962 | TAGAgtangc | 2986 | TAGAgtangg |
| 2915 | CNGAgtatgt | 2939 | CNGAgtanga | 2963 | CNGAgtangc | 2987 | CNGAgtangg |
| 2916 | NCGAgtatgt | 2940 | NCGAgtanga | 2964 | NCGAgtangc | 2988 | NCGAgtangg |
| 2917 | ACGAgtatgt | 2941 | ACGAgtanga | 2965 | ACGAgtangc | 2989 | ACGAgtangg |
| 2918 | CCGAgtatgt | 2942 | CCGAgtanga | 2966 | CCGAgtangc | 2990 | CCGAgtangg |
| 2919 | GCGAgtatgt | 2943 | GCGAgtanga | 2967 | GCGAgtangc | 2991 | GCGAgtangg |
| 2920 | TCGAgtatgt | 2944 | TCGAgtanga | 2968 | TCGAgtangc | 2992 | TCGAgtangg |
| 2921 | GNGAgtatgt | 2945 | GNGAgtanga | 2969 | GNGAgtangc | 2993 | GNGAgtangg |
| 2922 | NGGAgtatgt | 2946 | NGGAgtanga | 2970 | NGGAgtangc | 2994 | NGGAgtangg |
| 2923 | AGGAgtatgt | 2947 | AGGAgtanga | 2971 | AGGAgtangc | 2995 | AGGAgtangg |
| 2924 | CGGAgtatgt | 2948 | CGGAgtanga | 2972 | CGGAgtangc | 2996 | CGGAgtangg |
| 2925 | GGGAgtatgt | 2949 | GGGAgtanga | 2973 | GGGAgtangc | 2997 | GGGAgtangg |
| 2926 | TGGAgtatgt | 2950 | TGGAgtanga | 2974 | TGGAgtangc | 2998 | TGGAgtangg |
| 2927 | TNGAgtatgt | 2951 | TNGAgtanga | 2975 | TNGAgtangc | 2999 | TNGAgtangg |
| 2928 | NTGAgtatgt | 2952 | NTGAgtanga | 2976 | NTGAgtangc | 3000 | NTGAgtangg |
| 2929 | ATGAgtatgt | 2953 | ATGAgtanga | 2977 | ATGAgtangc | 3001 | ATGAgtangg |
| 2930 | CTGAgtatgt | 2954 | CTGAgtanga | 2978 | CTGAgtangc | 3002 | CTGAgtangg |
| 2931 | GTGAgtatgt | 2955 | GTGAgtanga | 2979 | GTGAgtangc | 3003 | GTGAgtangg |
| 2932 | TTGAgtatgt | 2956 | TTGAgtanga | 2980 | TTGAgtangc | 3004 | TTGAgtangg |
| 3005 | ANGAgtangt | 3029 | ANGAgtgngn | 3053 | ANGAgtgagn | 3077 | ANGAgtgcgn |
| 3006 | NAGAgtangt | 3030 | NAGAgtgngn | 3054 | NAGAgtgagn | 3078 | NAGAgtgcgn |
| 3007 | AAGAglangt | 3031 | AAGAgtgngn | 3055 | AAGAgtgagn | 3079 | AAGAgtgcgn |
| 3008 | CAGAgtangt | 3032 | CAGAgtgngn | 3056 | CAGAgtgagn | 3080 | CAGAgtgcgn |
| 3009 | GAGAgtangt | 3033 | GAGAgtgngn | 3057 | GAGAgtgagn | 3081 | GAGAgtgcgn |
| 3010 | TAGAgtangt | 3034 | TAGAgtgngn | 3058 | TAGAgtgagn | 3082 | TAGAgtgcgn |
| 3011 | CNGAgtangt | 3035 | CNGAgtgngn | 3059 | CNGAgtgagn | 3083 | CNGAgtgcgn |
| 3012 | NCGAgtangt | 3036 | NCGAgtgngn | 3060 | NCGAgtgagn | 3084 | NCGAgtgcgn |
| 3013 | ACGAgtangt | 3037 | ACGAgtgngn | 3061 | ACGAgtgagn | 3085 | ACGAgtgcgn |
| 3014 | CCGAgtangt | 3038 | CCGAgtgngn | 3062 | CCGAgtgagn | 3086 | CCGAgtgcgn |
| 3015 | GCGAgtangt | 3039 | GCGAgtgngn | 3063 | GCGAgtgagn | 3087 | GCGAgtgcgn |
| 3016 | TCGAgtangt | 3040 | TCGAgtgngn | 3064 | TCGAgtgagn | 3088 | TCGAgtgcgn |
| 3017 | GNGAgtangt | 3041 | GNGAgtgngn | 3065 | GNGAgtgagn | 3089 | GNGAgtgcgn |
| 3018 | NGGAgtangt | 3042 | NGGAgtgngn | 3066 | NGGAgtgagn | 3090 | NGGAgtgcgn |
| 3019 | AGGAgtangt | 3043 | AGGAgtgngn | 3067 | AGGAgtgagn | 3091 | AGGAgtgcgn |
| 3020 | CGGAgtangt | 3044 | CGGAgtgngn | 3068 | CGGAgtgagn | 3092 | CGGAgtgcgn |
| 3021 | GGGAgtangt | 3045 | GGGAgtgngn | 3069 | GGGAgtgagn | 3093 | GGGAgtgcgn |
| 3022 | TGGAgtangt | 3046 | TGGAgtgngn | 3070 | TGGAgtgagn | 3094 | TGGAgtgcgn |
| 3023 | INGAgtangt | 3047 | TNGAgtgngn | 3071 | TNGAgtgagn | 3095 | TNGAgtgcgn |
| 3024 | NTGAgtangt | 3048 | NTGAgtgngn | 3072 | NTGAgtgagn | 3096 | NTGAgtgcgn |
| 3025 | ATGAgtangt | 3049 | ATGAgtgngn | 3073 | ATGAgtgagn | 3097 | ATGAgtgcgn |
| 3026 | CTGAgtangt | 3050 | CTGAgtgngn | 3074 | CTGAgtgagn | 3098 | CTGAgtgcgn |
| 3027 | GTGAgtangt | 3051 | GTGAgtgngn | 3075 | GTGAgtgagn | 3099 | GTGAgtgcgn |
| 3028 | TTGAgtangt | 3052 | TTGAgtgngn | 3076 | TTGAgtgagn | 3100 | TTGAgtgcgn |
| 3101 | ANGAgtgggn | 3125 | ANGAgtgtgn | 3149 | ANGAgtgaga | 3173 | ANGAgtgcga |
| 3102 | NAGAgtgggn | 3126 | NAGAgtgtgn | 3150 | NAGAgtgaga | 3174 | NAGAgtgcga |
| 3103 | AAGAgtgggn | 3127 | AAGAgtgtgn | 3151 | AAGAgtgaga | 3175 | AAGAgtgcga |
| 3104 | CAGAgtgggn | 3128 | CAGAgtgtgn | 3152 | CAGAgtgaga | 3176 | CAGAgtgcga |
| 3105 | GAGAgtgggn | 3129 | GAGAgtgtgn | 3153 | GAGAgtgaga | 3177 | GAGAgtgcga |
| 3106 | TAGAgtgggn | 3130 | TAGAgtgtgn | 3154 | TAGAgtgaga | 3178 | TAGAgtgcga |
| 3107 | CNGAgtgggn | 3131 | CNGAgtgtgn | 3155 | CNGAgtgaga | 3179 | CNGAgtgcga |
| 3108 | NCGAgtgggn | 3132 | NCGAgtgtgn | 3156 | NCGAgtgaga | 3180 | NCGAgtgcga |
| 3109 | ACGAgtgggn | 3133 | ACGAgtgtgn | 3157 | ACGAgtgaga | 3181 | ACGAgtgcga |
| 3110 | CCGAgtgggn | 3134 | CCGAgtgtgn | 3158 | CCGAgtgaga | 3182 | CCGAgtgcga |
| 3111 | GCGAgtgggn | 3135 | GCGAgtgtgn | 3159 | GCGAgtgaga | 3183 | GCGAgtgcga |
| 3112 | TCGAgtgggn | 3136 | TCGAgtgtgn | 3160 | TCGAgtgaga | 3184 | TCGAgtgcga |
| 3113 | GNGAgtgggn | 3137 | GNGAgtgtgn | 3161 | GNGAgtgaga | 3185 | GNGAgtgcga |
| 3114 | NGGAgtgggn | 3138 | NGGAgtgtgn | 3162 | NGGAgtgaga | 3186 | NGGAgtgcga |
| 3115 | AGGAgtgggn | 3139 | AGGAgtgtgn | 3163 | AGGAgtgaga | 3187 | AGGAgtgcga |
| 3116 | CGGAgtgggn | 3140 | CGGAgtgtgn | 3164 | CGGAgtgaga | 3188 | CGGAgtgcga |
| 3117 | GGGAgtgggn | 3141 | GGGAgtgtgn | 3165 | GGGAgtgaga | 3189 | GGGAgtgcga |
| 3118 | TGGAgtgggn | 3142 | TGGAgtgtgn | 3166 | TGGAgtgaga | 3190 | TGGAgtgcga |
| 3119 | TNGAgtgggn | 3143 | TNGAgtgtgn | 3167 | TNGAgtgaga | 3191 | TNGAgtgcga |
| 3120 | NTGAgtgggn | 3144 | NTGAgtgtgn | 3168 | NTGAgtgaga | 3192 | NTGAgtgcga |
| 3121 | ATGAgtgggn | 3145 | ATGAgtgtgn | 3169 | ATGAgtgaga | 3193 | ATGAgtgcga |
| 3122 | CTGAgtgggn | 3146 | CTGAgtgtgn | 3170 | CTGAgtgaga | 3194 | CTGAgtgcga |
| 3123 | GTGAgtgggn | 3147 | GTGAgtgtgn | 3171 | GTGAgtgaga | 3195 | GTGAgtgcga |
| 3124 | TTGAgtgggn | 3148 | TTGAgtgtgn | 3172 | TTGAgtgaga | 3196 | TTGAgtgcga |
| 3197 | ANGAgtggga | 3221 | ANGAgtgtga | 3245 | ANGAgtgagc | 3269 | ANGAgtgcgc |
| 3198 | NAGAgtggga | 3222 | NAGAgtgtga | 3246 | NAGAgtgagc | 3270 | NAGAgtgcgc |
| 3199 | AAGAgtggga | 3223 | AAGAgtgtga | 3247 | AAGAgtgagc | 3271 | AAGAgtgcgc |
| 3200 | CAGAgtggga | 3224 | CAGAgtgtga | 3248 | CAGAgtgagc | 3272 | CAGAgtgcgc |
| 3201 | GAGAgtggga | 3225 | GAGAgtgtga | 3249 | GAGAgtgagc | 3273 | GAGAgtgcgc |
| 3202 | TAGAgtggga | 3226 | TAGAgtgtga | 3250 | TAGAgtgagc | 3274 | TAGAgtgcgc |
| 3203 | CNGAgtggga | 3227 | CNGAgtgtga | 3251 | CNGAgtgagc | 3275 | CNGAgtgcgc |
| 3204 | NCGAgtggga | 3228 | NCGAgtgtga | 3252 | NCGAgtgagc | 3276 | NCGAgtgcgc |
| 3205 | ACGAgtggga | 3229 | ACGAgtgtga | 3253 | ACGAgtgagc | 3277 | ACGAgtgcgc |
| 3206 | CCGAgtggga | 3230 | CCGAgtgtga | 3254 | CCGAgtgagc | 3278 | CCGAgtgcgc |
| 3207 | GCGAgtggga | 3231 | GCGAgtgtga | 3255 | GCGAgtgagc | 3279 | GCGAgtgcgc |
| 3208 | TCGAgtggga | 3232 | TCGAgtgtga | 3256 | TCGAgtgagc | 3280 | TCGAgtgcgc |
| 3209 | GNGAgtggga | 3233 | GNGAgtgtga | 3257 | GNGAgtgagc | 3281 | GNGAgtgcgc |
| 3210 | NGGAgtggga | 3234 | NGGAgtgtga | 3258 | NGGAgtgagc | 3282 | NGGAgtgcgc |
| 3211 | AGGAgtggga | 3235 | AGGAgtgtga | 3259 | AGGAgtgagc | 3283 | AGGAgtgcgc |
| 3212 | CGGAgtggga | 3236 | CGGAgtgtga | 3260 | CGGAgtgagc | 3284 | CGGAgtgcgc |
| 3213 | GGGAgtggga | 3237 | GGGAgtgtga | 3261 | GGGAgtgagc | 3285 | GGGAgtgcgc |
| 3214 | TGGAgtggga | 3238 | TGGAgtgtga | 3262 | TGGAgtgagc | 3286 | TGGAgtgcgc |
| 3215 | TNGAgtggga | 3239 | TNGAgtgtga | 3263 | TNGAgtgagc | 3287 | TNGAgtgcgc |
| 3216 | NTGAgtggga | 3240 | NTGAgtgtga | 3264 | NTGAgtgagc | 3288 | NTGAgtgcgc |
| 3217 | ATGAgtggga | 3241 | ATGAgtgtga | 3265 | ATGAgtgagc | 3289 | ATGAgtgcgc |
| 3218 | CTGAgtggga | 3242 | CTGAgtgtga | 3266 | CTGAgtgagc | 3290 | CTGAgtgcgc |
| 3219 | GTGAgtggga | 3243 | GTGAgtgtga | 3267 | GTGAgtgagc | 3291 | GTGAgtgcgc |
| 3220 | TTGAgtggga | 3244 | TTGAgtgtga | 3268 | TTGAgtgagc | 3292 | TTGAgtgcgc |
| 3293 | ANGAgtgggc | 3317 | ANGAgtgtgc | 3341 | ANGAgtgagg | 3365 | ANGAgtgcgg |
| 3294 | NAGAgtgggc | 3318 | NAGAgtgtgc | 3342 | NAGAgtgagg | 3366 | NAGAgtgcgg |
| 3295 | AAGAgtgggc | 3319 | AAGAgtgtgc | 3343 | AAGAgtgagg | 3367 | AAGAgtgcgg |
| 3296 | CAGAgtgggc | 3320 | CAGAgtgtgc | 3344 | CAGAgtgagg | 3368 | CAGAgtgcgg |
| 3297 | GAGAgtgggc | 3321 | GAGAgtgtgc | 3345 | GAGAgtgagg | 3369 | GAGAgtgcgg |
| 3298 | TAGAgtgggc | 3322 | TAGAgtgtgc | 3346 | TAGAgtgagg | 3370 | TAGAgtgcgg |
| 3299 | CNGAgtgggc | 3323 | CNGAgtgtgc | 3347 | CNGAgtgagg | 3371 | CNGAgtgcgg |
| 3300 | NCGAgtgggc | 3324 | NCGAgtgtgc | 3348 | NCGAgtgagg | 3372 | NCGAgtgcgg |
| 3301 | ACGAgtgggc | 3325 | ACGAgtgtgc | 3349 | ACGAgtgagg | 3373 | ACGAgtgcgg |
| 3302 | CCGAgtgggc | 3326 | CCGAgtgtgc | 3350 | CCGAgtgagg | 3374 | CCGAgtgcgg |
| 3303 | GCGAgtgggc | 3327 | GCGAgtgtgc | 3351 | GCGAgtgagg | 3375 | GCGAgtgcgg |
| 3304 | TCGAgtgggc | 3328 | TCGAgtgtgc | 3352 | TCGAgtgagg | 3376 | TCGAgtgcgg |
| 3305 | GNGAgtgggc | 3329 | GNGAgtgtgc | 3353 | GNGAgtgagg | 3377 | GNGAgtgcgg |
| 3306 | NGGAgtgggc | 3330 | NGGAgtgtgc | 3354 | NGGAgtgagg | 3378 | NGGAgtgcgg |
| 3307 | AGGAgtgggc | 3331 | AGGAgtgtgc | 3355 | AGGAgtgagg | 3379 | AGGAgtgcgg |
| 3308 | CGGAgtgggc | 3332 | CGGAgtgtgc | 3356 | CGGAgtgagg | 3380 | CGGAgtgcgg |
| 3309 | GGGAgtgggc | 3333 | GGGAgtgtgc | 3357 | GGGAgtgagg | 3381 | GGGAgtgcgg |
| 3310 | TGGAgtgggc | 3334 | TGGAgtgtgc | 3358 | TGGAgtgagg | 3382 | TGGAgtgcgg |
| 3311 | TNGAgtgggc | 3335 | TNGAgtgtgc | 3359 | TNGAgtgagg | 3383 | TNGAgtgcgg |
| 3312 | NTGAgtgggc | 3336 | NTGAgtgtgc | 3360 | NTGAgtgagg | 3384 | NTGAgtgcgg |
| 3313 | ATGAgtgggc | 3337 | ATGAgtgtgc | 3361 | ATGAgtgagg | 3385 | ATGAgtgcgg |
| 3314 | CTGAgtgggc | 3338 | CTGAgtgtgc | 3362 | CTGAgtgagg | 3386 | CTGAgtgcgg |
| 3315 | GTGAgtgggc | 3339 | GTGAgtgtgc | 3363 | GTGAgtgagg | 3387 | GTGAgtgcgg |
| 3316 | TTGAgtgggc | 3340 | TTGAgtgtgc | 3364 | TTGAgtgagg | 3388 | TTGAgtgcgg |
| 3389 | ANGAgtgggg | 3413 | ANGAgtgtgg | 3437 | ANGAgtgagt | 3461 | ANGAgtgcgt |
| 3390 | NAGAgtgggg | 3414 | NAGAgtgtgg | 3438 | NAGAgtgagt | 3462 | NAGAgtgcgt |
| 3391 | AAGAgtgggg | 3415 | AAGAgtgtgg | 3439 | AAGAgtgagt | 3463 | AAGAgtgcgt |
| 3392 | CAGAgtgggg | 3416 | CAGAgtgtgg | 3440 | CAGAgtgagt | 3464 | CAGAgtgcgt |
| 3393 | GAGAgtgggg | 3417 | GAGAgtgtgg | 3441 | GAGAgtgagt | 3465 | GAGAgtgcgt |
| 3394 | TAGAgtgggg | 3418 | TAGAgtgtgg | 3442 | TAGAgtgagt | 3466 | TAGAgtgcgt |
| 3395 | CNGAgtgggg | 3419 | CNGAgtgtgg | 3443 | CNGAgtgagt | 3467 | CNGAgtgcgt |
| 3396 | NCGAgtgggg | 3420 | NCGAgtgtgg | 3444 | NCGAgtgagt | 3468 | NCGAgtgcgt |
| 3397 | ACGAgtgggg | 3421 | ACGAgtgtgg | 3445 | ACGAgtgagt | 3469 | ACGAgtgcgt |
| 3398 | CCGAgtgggg | 3422 | CCGAgtgtgg | 3446 | CCGAgtgagt | 3470 | CCGAgtgcgt |
| 3399 | GCGAgtgggg | 3423 | GCGAgtgtgg | 3447 | GCGAgtgagt | 3471 | GCGAgtgcgt |
| 3400 | TCGAgtgggg | 3424 | TCGAgtgtgg | 3448 | TCGAgtgagt | 3472 | TCGAgtgcgt |
| 3401 | GNGAgtgggg | 3425 | GNGAgtgtgg | 3449 | GNGAgtgagt | 3473 | GNGAgtgcgt |
| 3402 | NGGAgtgggg | 3426 | NGGAgtgtgg | 3450 | NGGAgtgagt | 3474 | NGGAgtgcgt |
| 3403 | AGGAgtgggg | 3427 | AGGAgtgtgg | 3451 | AGGAgtgagt | 3475 | AGGAgtgcgt |
| 3404 | CGGAgtgggg | 3428 | CGGAgtgtgg | 3452 | CGGAgtgagt | 3476 | CGGAgtgcgt |
| 3405 | GGGAgtgggg | 3429 | GGGAgtgtgg | 3453 | GGGAgtgagt | 3477 | GGGAgtgcgt |
| 3406 | TGGAgtgggg | 3430 | TGGAgtgtgg | 3454 | TGGAgtgagt | 3478 | TGGAgtgcgt |
| 3407 | TNGAgtgggg | 3431 | TNGAgtgtgg | 3455 | TNGAgtgagt | 3479 | TNGAgtgcgt |
| 3408 | NTGAgtgggg | 3432 | NTGAgtgtgg | 3456 | NTGAgtgagt | 3480 | NTGAgtgcgt |
| 3409 | ATGAgtgggg | 3433 | ATGAgtgtgg | 3457 | ATGAgtgagt | 3481 | ATGAgtgcgt |
| 3410 | CTGAgtgggg | 3434 | CTGAgtgtgg | 3458 | CTGAgtgagt | 3482 | CTGAgtgcgt |
| 3411 | GTGAgtgggg | 3435 | GTGAgtgtgg | 3459 | GTGAgtgagt | 3483 | GTGAgtgcgt |
| 3412 | TTGAgtgggg | 3436 | TTGAgtgtgg | 3460 | TTGAgtgagt | 3484 | TTGAgtgcgt |
| 3485 | ANGAgtgggt | 3509 | ANGAgtgtgt | 3533 | ANGAgtgnga | 3557 | ANGAgtgngc |
| 3486 | NAGAgtgggt | 3510 | NAGAgtgtgt | 3534 | NAGAgtgnga | 3558 | NAGAgtgngc |
| 3487 | AAGAgtgggt | 3511 | AAGAgtgtgt | 3535 | AAGAgtgnga | 3559 | AAGAgtgngc |
| 3488 | CAGAgtgggt | 3512 | CAGAgtgtgt | 3536 | CAGAgtgnga | 3560 | CAGAgtgngc |
| 3489 | GAGAgtgggt | 3513 | GAGAgtgtgt | 3537 | GAGAgtgnga | 3561 | GAGAgtgngc |
| 3490 | TAGAgtgggt | 3514 | TAGAgtgtgt | 3538 | TAGAgtgnga | 3562 | TAGAgtgngc |
| 3491 | CNGAgtgggt | 3515 | CNGAgtgtgt | 3539 | CNGAgtgnga | 3563 | CNGAgtgngc |
| 3492 | NCGAgtgggt | 3516 | NCGAgtgtgt | 3540 | NCGAgtgnga | 3564 | NCGAgtgngc |
| 3493 | ACGAgtgggt | 3517 | ACGAgtgtgt | 3541 | ACGAgtgnga | 3565 | ACGAgtgngc |
| 3494 | CCGAgtgggt | 3518 | CCGAgtgtgt | 3542 | CCGAgtgnga | 3566 | CCGAgtgngc |
| 3495 | GCGAgtgggt | 3519 | GCGAgtgtgt | 3543 | GCGAgtgnga | 3567 | GCGAgtgngc |
| 3496 | TCGAgtgggt | 3520 | TCGAgtgtgt | 3544 | TCGAgtgnga | 3568 | TCGAgtgngc |
| 3497 | GNGAgtgggt | 3521 | GNGAgtgtgt | 3545 | GNGAgtgnga | 3569 | GNGAgtgngc |
| 3498 | NGGAgtgggt | 3522 | NGGAgtgtgt | 3546 | NGGAgtgnga | 3570 | NGGAgtgngc |
| 3499 | AGGAgtgggt | 3523 | AGGAgtgtgt | 3547 | AGGAgtgnga | 3571 | AGGAgtgngc |
| 3500 | CGGAgtgggt | 3524 | CGGAgtgtgt | 3548 | CGGAgtgnga | 3572 | CGGAgtgngc |
| 3501 | GGGAgtgggt | 3525 | GGGAgtgtgt | 3549 | GGGAgtgnga | 3573 | GGGAgtgngc |
| 3502 | TGGAgtgggt | 3526 | TGGAgtgtgt | 3550 | TGGAgtgnga | 3574 | TGGAgtgngc |
| 3503 | TNGAgtgggt | 3527 | TNGAgtgtgt | 3551 | TNGAgtgnga | 3575 | TNGAgtgngc |
| 3504 | NTGAgtgggt | 3528 | NTGAgtgtgt | 3552 | NTGAgtgnga | 3576 | NTGAgtgngc |
| 3505 | ATGAgtgggt | 3529 | ATGAgtgtgt | 3553 | ATGAgtgnga | 3577 | ATGAgtgngc |
| 3506 | CTGAgtgggt | 3530 | CTGAgtgtgt | 3554 | CTGAgtgnga | 3578 | CTGAgtgngc |
| 3507 | GTGAgtgggt | 3531 | GTGAgtgtgt | 3555 | GTGAgtgnga | 3579 | GTGAgtgngc |
| 3508 | TTGAgtgggt | 3532 | TTGAgtgtgt | 3556 | TTGAgtgnga | 3580 | TTGAgtgngc |
| 3581 | ANGAgtgngg | 3593 | GNGAgtgngg | 3605 | ANGAgtgngt | 3617 | GNGAgtgngt |
| 3582 | NAGAgtgngg | 3594 | NGGAgtgngg | 3606 | NAGAgtgngt | 3618 | NGGAgtgngt |
| 3583 | AAGAgtgngg | 3595 | AGGAgtgngg | 3607 | AAGAgtgngt | 3619 | AGGAgtgngt |
| 3584 | CAGAgtgngg | 3596 | CGGAgtgngg | 3608 | CAGAgtgngt | 3620 | CGGAgtgngt |
| 3585 | GAGAgtgngg | 3597 | GGGAgtgngg | 3609 | GAGAgtgngt | 3621 | GGGAgtgngt |
| 3586 | TAGAgtgngg | 3598 | TGGAgtgngg | 3610 | TAGAgtgngt | 3622 | TGGAgtgngt |
| 3587 | CNGAgtgngg | 3599 | TNGAgtgngg | 3611 | CNGAgtgngt | 3623 | TNGAgtgngt |
| 3588 | NCGAgtgngg | 3600 | NTGAgtgngg | 3612 | NCGAgtgngt | 3624 | NTGAgtgngt |
| 3589 | ACGAgtgngg | 3601 | ATGAgtgngg | 3613 | ACGAgtgngt | 3625 | ATGAgtgngt |
| 3590 | CCGAgtgngg | 3602 | CTGAgtgngg | 3614 | CCGAgtgngt | 3626 | CTGAgtgngt |
| 3591 | GCGAgtgngg | 3603 | GTGAgtgngg | 3615 | GCGAgtgngt | 3627 | GTGAgtgngt |
| 3592 | TCGAgtgngg | 3604 | TTGAgtgngg | 3616 | TCGAgtgngt | 3628 | TTGAgtgngt |

[0050] In certain embodiments, provided herein is a vector comprising the artificial gene construct described herein. In some embodiments, provided herein is a cell comprising an artificial gene construct described herein or a vector comprising an artificial gene construct described herein.

[0051] In another aspect, provided herein is a method of modulating the amount and type of a protein produced by a cell containing an artificial gene construct described herein. In one embodiment, provided herein is a method of modulating the amount and type of a protein produced by a cell containing an artificial gene construct described herein, the method comprising contacting the cell with a compound of Formula (I) or a form thereof. In certain embodiments, the artificial gene construct encodes a therapeutic protein. In certain embodiments, the artificial gene construct encodes a non-functional protein. In some embodiments producing a therapeutic protein, the artificial gene construct may also encode a detectable reporter protein. In some embodiments producing a non-functional protein, the artificial gene construct may also encode a detectable reporter protein.

[0052] In another aspect, provided herein is a method of modulating the amount of a protein produced by a subject, wherein the subject is or was administered an artificial gene construct described herein. In one embodiment, provided herein is method of regulating the amount of a protein produced by a subject, the method comprising: (a) administering an artificial gene construct or a vector comprising the artificial gene construct described herein to the subject; and (b) administering a compound of Formula (I) or a form thereof to the subject. In another embodiment, provided herein is a method of regulating the amount of a protein produced by a subject, the method comprising administering a compound of Formula (I) or a form thereof to a subject carrying a gene containing a nucleotide sequence encoding an intronic REMS. In another embodiment, provided herein is a method of regulating the amount of a protein produced by a subject, the method comprising administering a compound of Formula (I) to the subject, wherein the subject was previously administered an artificial gene construct described herein. In certain embodiments, the artificial gene construct may encode a therapeutic or a non-functional protein. In some embodiments, the artificial gene construct encodes a detectable reporter protein. In certain embodiments, the subject is a non-human. In specific embodiments, the subject is a human.

[0053] In another aspect, provided herein is a method for modulating the amount of an RNA transcript produced from precursor RNA containing an endogenous or non-endogenous intronic recognition element for splicing modifier (REMS), the method comprising contacting the precursor RNA with a compound of Formula (I) or a form thereof, wherein the endogenous or non-endogenous intronic REMS comprises the sequence GAgurngn (SEQ ID NO: 2), wherein r is adenine or guanine and n is any nucleotide, and wherein Formula (I) is

[chemical structure]

[0054] wherein:
[0055] w₁ and w₅ are independently C—Rₐ or N;
[0056] w₂ is C—R_{b} or N;
[0057] w₃, w₄ and w₇ are independently C—R₁, C—R₂, C—Rₐ or N;
[0058] w₆ is C—R₁, C—R₂, C—R_{c} or N;
[0059] wherein one of w₃, w₄, w₆ and w₇ is C—R₁ and one other of w₃, w₄, w₆ and w₇ is C—R₂, provided that,
[0060] when w₃ is C—R₁, then w₆ is C—R₂ and w₄ and w₇ are independently C—Rₐ or N; or,
[0061] when w₃ is C—R₂, then w₆ is C—R₁ and w₄ and w₇ are independently C—Rₐ or N; or,
[0062] when w₄ is C—R₁, then w₇ is C—R₂ and w₃ is C—Rₐ or N and w₆ is C—R_{c} or N; or,
[0063] when w₄ is C—R₂, then w₇ is C—R₁ and w₃ is C—Rₐ or N and w₆ is C—R_{c} or N; and,
[0064] wherein any one, two or three of w₁, w₂, w₃, w₄, w₅, w₆ and w₇ may optionally be N;
[0065] R₁ is C₁₋₈alkyl, amino, C₁₋₈alkyl-amino, (C₁₋₈alkyl)₂-amino, C₁₋₈alkoxy-C₁₋₈alkyl-amino, (C₁₋₈alkoxy-C₁₋₈alkyl)₂-amino, (C₁₋₈alkoxy-C₁₋₈alkyl)(C₁₋₈alkyl)amino, amino-C₁₋₈alkyl, C₁₋₈alkyl-amino-C₁₋₈alkyl, (C₁₋₈alkyl)₂-amino-C₁₋₈alkyl, C₁₋₈alkoxy-C₁₋₈alkyl-amino-C₁₋₈alkyl, (C₁₋₈alkoxy-C₁₋₈alkyl)₂-amino-C₁₋₈alkyl, (C₁₋₈alkoxy-C₁₋₈alkyl)(C₁₋₈alkyl)amino-C₁₋₈alkyl, amino-C₁₋₈alkyl-amino, (amino-C₁₋₈alkyl)₂-amino, (amino-C₁₋₈alkyl)(C₁₋₈alkyl)amino, C₁₋₈alkyl-amino-C₁₋₈alkyl-amino, (C₁₋₈alkyl-amino-C₁₋₈alkyl)₂-amino, (C₁₋₈alkyl-amino-C₁₋₈alkyl)(C₁₋₈alkyl)amino, (C₁₋₈alkyl)₂-amino-C₁₋₈alkyl-amino, [(C₁₋₈alkyl)₂-amino-C₁₋₈alkyl](C₁₋₈alkyl)amino, amino-C₁₋₈alkoxy, C₁₋₈alkyl-amino-C₁₋₈alkoxy, (C₁₋₈alkyl)₂-amino-C₁₋₈alkoxy, C₁₋₈alkoxy-C₁₋₈alkyl-amino-C₁₋₈alkoxy, C₁₋₈alkoxy-C₁₋₈alkyl-amino-C₁₋₈alkoxy, (C₁₋₈alkoxy-C₁₋₈alkyl)(C₁₋₈alkyl)amino-C₁₋₈alkoxy, amino-C₂₋₈alkenyl, C₁₋₈alkyl-amino-C₂₋₈alkenyl, (C₁₋₈alkyl)₂-amino-C₂₋₈alkenyl, amino-C₂₋₈alkynyl, C₁₋₈alkyl-amino-C₂₋₈alkynyl, (C₁₋₈alkyl)₂-amino-C₂₋₈alkynyl, halo-C₁₋₈alkyl-amino, (halo-C₁₋₈alkyl)₂-amino, (halo-C₁₋₈alkyl)C₁₋₈alkyl)amino, hydroxy-C₁₋₈alkyl, hydroxy-C₁₋₈alkoxy-C₁₋₈alkyl, hydroxy-C₁₋₈alkyl-amino, (hydroxy-C₁₋₈alkyl)₂-amino, (hydroxy-C₁₋₈alkyl)(C₁₋₈alkyl)amino, hydroxy-C₁₋₈alkyl-amino-C₁₋₈alkyl, (hydroxy-C₁₋₈alkyl)₂-amino-C₁₋₈alkyl, (hydroxy-C₁₋₈alkyl)(C₁₋₈alkyl)amino-C₁₋₈alkyl, hydroxy-C₁₋₈alkyl-amino-C₁₋₈alkoxy, (hydroxy-C₁₋₈alkyl)₂-amino-C₁₋₈alkoxy, (hydroxy-C₁₋₈alkyl)(C₁₋₈alkyl)amino-C₁₋₈alkoxy, hydroxy-C₁₋₈alkyl-amino-C₁₋₈alkyl-amino, (hydroxy-C₁₋₈alkyl-amino-C₁₋₈alkyl)₂-amino, (hydroxy-C₁₋₈alkyl)₂-amino-C₁₋₈alkyl-amino, (hydroxy-C₁₋₈alkyl-amino-C₁₋₈alkyl)(C₁₋₈alkyl)amino, (hydroxy-C₁₋₈alkyl)(C₁₋₈alkyl)amino-C₁₋₈alkyl-amino, [(hydroxy-C₁₋₈alkyl)₂-amino-C₁₋₈alkyl](C₁₋₈alkyl)amino, [(hydroxy-C₁₋₈alkyl)(C₁₋₈alkyl)amino-C₁₋₈alkyl](C₁₋₈alkyl)amino, heterocyclyl, heterocyclyl-C₁₋₈alkyl, heterocyclyl-C₁₋₈alkoxy, heterocyclyl-amino, (heterocyclyl)(C₁₋₈alkyl)amino, heterocyclyl-amino-C₁₋₈alkyl, heterocyclyl-C₁₋₈alkyl-amino, (heterocyclyl-C₁₋₈alkyl)₂-amino, (heterocyclyl-C₁₋₈alkyl)(C₁₋₈alkyl)amino, heterocyclyl-C₁₋₈alkyl-amino-C₁₋₈alkyl, (heterocyclyl-C₁₋₈alkyl)₂-amino-C₁₋₈alkyl, (heterocyclyl-C₁₋₈alkyl)(C₁₋₈alkyl)amino-C₁₋₈alkyl, heterocyclyl-oxy, heterocyclyl-carbonyl, heterocyclyl-carbonyl-oxy, C₃₋₁₄cycloalkyl, aryl-C₁₋₈alkyl-amino, (aryl-C₁₋₈alkyl)₂-amino, (aryl-C₁₋₈alkyl)(C₁₋₈alkyl)amino, aryl-C₁₋₈alkyl-amino-C₁₋₈alkyl, (aryl-C₁₋₈alkyl)₂-amino-C₁₋₈alkyl, (aryl-C₁₋₈alkyl)(C₁₋₈alkyl)amino-C₁₋₈alkyl, heteroaryl, heteroaryl-C₁₋₈alkyl, heteroaryl-C₁₋₈alkoxy, heteroaryl-amino, heteroaryl-C₁₋₈alkyl-amino, (heteroaryl-C₁₋₈alkyl)₂-amino, (heteroaryl-C₁₋₈alkyl)(C₁₋₈alkyl)amino, heteroaryl-C₁₋₈alkyl-amino-C₁₋₈alkyl, (heteroaryl-C₁₋₈alkyl)₂-amino-C₁₋₈alkyl or (heteroaryl-C₁₋₈alkyl)(C₁₋₈alkyl)amino-C₁₋₈alkyl;
[0066] wherein, each instance of heterocyclyl, C₃₋₁₄cycloalkyl, aryl and heteroaryl is optionally substituted with one, two or three R₃ substituents and optionally, with one additional R₄ substituent; or,
[0067] wherein, each instance of heterocyclyl, C₃₋₁₄cycloalkyl, aryl and heteroaryl is optionally substituted with one, two, three or four R₃ substituents;
[0068] R₂ is aryl, aryl-amino, aryl-amino-carbonyl, heterocyclyl, heteroaryl or heteroaryl-amino;
[0069] wherein, each instance of aryl, heterocyclyl and heteroaryl is optionally substituted with one, two or three R₆ substituents and optionally, with one additional R₇ substituent;
[0070] Rₐ is, in each instance, independently selected from hydrogen, halogen, C₁₋₈alkyl or deuterium;
[0071] R_{b} is hydrogen, halogen, C₁₋₈alkyl, C₁₋₈alkoxy or deuterium;
[0072] R_{c} is hydrogen, halogen, C₁₋₈alkyl or deuterium;
[0073] R₃ is, in each instance, independently selected from cyano, halogen, hydroxy, oxo, C₁₋₈alkyl, halo-C₁₋₈alkyl, C₁₋₈alkyl-carbonyl, C₁₋₈alkoxy, halo-C₁₋₈alkoxy, C₁₋₈alkoxy-C₁₋₈alkyl, C₁₋₈alkoxy-carbonyl, amino, C₁₋₈alkyl-amino, (C₁₋₈alkyl)₂-amino, amino-C₁₋₈alkyl, C₁₋₈alkyl-amino-C₁₋₈alkyl, (C₁₋₈alkyl)₂-amino-C₁₋₈alkyl, amino-C₁₋₈alkyl-amino, C₁₋₈alkyl-amino-C₁₋₈alkyl-amino, (C₁₋₈alkyl-amino-C₁₋₈alkyl)₂-amino, (C₁₋₈alkyl)₂-amino-C₁₋₈alkyl-amino, [(C₁₋₈alkyl)₂-amino-C₁₋₈alkyl]₂-amino, (C₁₋₈alkyl-amino-C₁₋₈alkyl)(C₁₋₈alkyl)amino, [(C₁₋₈alkyl)₂-amino-C₁₋₈alkyl](C₁₋₈alkyl)amino, C₁₋₈alkoxy-C₁₋₈alkyl-amino, (C₁₋₈alkoxy-C₁₋₈alkyl)₂-amino, (C₁₋₈alkoxy-C₁₋₈alkyl)(C₁₋₈alkyl)amino, C₁₋₈alkyl-carbonyl-amino, C₁₋₈alkoxy-carbonyl-amino, hydroxy-C₁₋₈alkyl, hydroxy-C₁₋₈alkoxy-C₁₋₈alkyl, hydroxy-C₁₋₈alkyl-amino, (hydroxy-C₁₋₈alkyl)₂-amino or (hydroxy-C₁₋₈alkyl)(C₁₋₈alkyl)amino;
[0074] R₄ is C₃₋₁₄cycloalkyl, C₃₋₁₄cycloalkyl-C₁₋₈alkyl, C₃₋₁₄cycloalkyl-amino, aryl-C₁₋₈alkyl, aryl-C₁₋₈alkoxy-carbonyl, aryl-sulfonyloxy-C₁₋₈alkyl, heterocyclyl or heterocyclyl-C₁₋₈alkyl; wherein, each instance of C₃₋₁₄cycloalkyl, aryl and heterocyclyl is optionally substituted with one, two or three R₅ substituents;
[0075] R₅ is, in each instance, independently selected from halogen, hydroxy, cyano, nitro, C₁₋₈alkyl, halo-C₁₋₈alkyl, C₁₋₈alkoxy, halo-C₁₋₈alkoxy, amino, C₁₋₈alkyl-amino, (C₁₋₈alkyl)₂-amino or C₁₋₈alkyl-thio;
[0076] R₆ is, in each instance, independently selected from halogen, hydroxy, cyano, nitro, C₁₋₈alkyl, C₂₋₈alkenyl, halo-C₁₋₈alkyl, hydroxy-C₁₋₈alkyl, C₁₋₈alkoxy, halo-C₁₋₈alkoxy, C₁₋₈alkoxy-C₁₋₈alkyl, amino, C₁₋₈alkyl-amino, (C₁₋₈alkyl)₂-amino or C₁₋₈alkyl-thio; and,
[0077] R₇ is C₃₋₁₄cycloalkyl, C₃₋₁₄cycloalkyl-oxy, aryl, heterocyclyl or heteroaryl.

[0078] In another aspect, provided herein is a method for modulating the amount of an RNA transcript produced from precursor RNA containing an endogenous or non-endogenous intronic recognition element for splicing modifier (REMS), the method comprising contacting the precursor RNA with a compound of Formula (I) or a form thereof, wherein the endogenous or non-endogenous intronic REMS comprises the sequence NNGAgurngn (SEQ ID NO: 1), wherein r is adenine or guanine and n or N is any nucleotide, and wherein Formula (I) is

[chemical structure]

[0079] wherein:
[0080] w₁ and w₅ are independently C—Rₐ or N;
[0081] w₂ is C—R_{b} or N;
[0082] w₃, w₄ and w₇ are independently C—R₁, C—R₂, C—Rₐ or N;
[0083] w₆ is C—R₁, C—R₂, C—R_{c} or N;
[0084] wherein one of w₃, w₄, w₆ and w₇ is C—R₁ and one other of w₃, w₄, w₆ and w₇ is C—R₂, provided that,
[0085] when w₃ is C—R₁, then w₆ is C—R₂ and w₄ and w₇ are independently C—Rₐ or N; or,
[0086] when w₃ is C—R₂, then w₆ is C—R₁ and w₄ and w₇ are independently C—Rₐ or N; or,
[0087] when w₄ is C—R₁, then w₇ is C—R₂ and w₃ is C—Rₐ or N and w₆ is C—R_{c} or N; or,
[0088] when w₄ is C—R₂, then w₇ is C—R₁ and w₃ is C—Rₐ or N and w₆ is C—R_{c} or N; and,
[0089] wherein any one, two or three of w₁, w₂, w₃, w₄, w₅, w₆ and w₇ may optionally be N;
[0090] R₁ is C₁₋₈alkyl, amino, C₁₋₈alkyl-amino, (C₁₋₈alkyl)₂-amino, C₁₋₈alkoxy-C₁₋₈alkyl-amino, (C₁₋₈alkoxy-C₁₋₈alkyl)₂-amino, (C₁₋₈alkoxy-C₁₋₈alkyl)(C₁₋₈alkyl)amino, amino-C₁₋₈alkyl, C₁₋₈alkyl-amino-C₁₋₈alkyl, (C₁₋₈alkyl)₂-amino-C₁₋₈alkyl, C₁₋₈alkoxy-C₁₋₈alkyl-amino-C₁₋₈alkyl, (C₁₋₈alkoxy-C₁₋₈alkyl)₂-amino-C₁₋₈alkyl, (C₁₋₈alkoxy-C₁₋₈alkyl)(C₁₋₈alkyl)amino-C₁₋₈alkyl, amino-C₁₋₈alkyl-amino, (amino-C₁₋₈alkyl)₂-amino, (amino-C₁₋₈alkyl)(C₁₋₈alkyl)amino, C₁₋₈alkyl-amino-C₁₋₈alkyl-amino, (C₁₋₈alkyl-amino-C₁₋₈alkyl)₂-amino, (C₁₋₈alkyl-amino-C₁₋₈alkyl)(C₁₋₈alkyl)amino, (C₁₋₈alkyl)₂-amino-C₁₋₈alkyl-amino, [(C₁₋₈alkyl)₂-amino-C₁₋₈alkyl](C₁₋₈alkyl)amino, amino-C₁₋₈alkoxy, C₁₋₈alkyl-amino-C₁₋₈alkoxy, (C₁₋₈alkyl)₂-amino-C₁₋₈alkoxy, C₁₋₈alkoxy-C₁₋₈alkyl-amino-C₁₋₈alkoxy, C₁₋₈alkoxy-C₁₋₈alkyl-amino-C₁₋₈alkoxy, (C₁₋₈alkoxy-C₁₋₈alkyl)(C₁₋₈alkyl)amino-C₁₋₈alkoxy, amino-C₂₋₈alkenyl, C₁₋₈alkyl-amino-C₂₋₈alkenyl, (C₁₋₈alkyl)₂-amino-C₂₋₈alkenyl, amino-C₂₋₈alkynyl, C₁₋₈alkyl-amino-C₂₋₈alkynyl, (C₁₋₈alkyl)₂-amino-C₂₋₈alkynyl, halo-C₁₋₈alkyl-amino, (halo-C₁₋₈alkyl)₂-amino, (halo-C₁₋₈alkyl)(C₁₋₈alkyl)amino, hydroxy-C₁₋₈alkyl, hydroxy-C₁₋₈alkoxy-C₁₋₈alkyl, hydroxy-C₁₋₈alkyl-amino, (hydroxy-C₁₋₈alkyl)₂-amino, (hydroxy-C₁₋₈alkyl)(C₁₋₈alkyl)amino, hydroxy-C₁₋₈alkyl-amino-C₁₋₈alkyl, (hydroxy-C₁₋₈alkyl)₂-amino-C₁₋₈alkyl, (hydroxy-C₁₋₈alkyl)(C₁₋₈alkyl)amino-C₁₋₈alkyl, hydroxy-C₁₋₈alkyl-amino-C₁₋₈alkoxy, (hydroxy-C₁₋₈alkyl)₂-amino-C₁₋₈alkoxy, (hydroxy-C₁₋₈alkyl)(C₁₋₈alkyl)amino-C₁₋₈alkoxy, hydroxy-C₁₋₈alkyl-amino-C₁₋₈alkyl-amino, (hydroxy-C₁₋₈alkyl-amino-C₁₋₈alkyl)₂-amino, (hydroxy-C₁₋₈alkyl)₂-amino-C₁₋₈alkyl-amino, (hydroxy-C₁₋₈alkyl-amino-C₁₋₈alkyl)(C₁₋₈alkyl)amino, (hydroxy-C₁₋₈alkyl)(C₁₋₈alkyl)amino-C₁₋₈alkyl-amino, [(hydroxy-C₁₋₈alkyl)₂-amino-C₁₋₈alkyl](C₁₋₈alkyl)amino, [(hydroxy-C₁₋₈alkyl)(C₁₋₈alkyl)amino-C₁₋₈alkyl](C₁₋₈alkyl)amino, heterocyclyl, heterocyclyl-C₁₋₈alkyl, heterocyclyl-C₁₋₈alkoxy, heterocyclyl-amino, (heterocyclyl)(C₁₋₈alkyl)amino, heterocyclyl-amino-C₁₋₈alkyl, heterocyclyl-C₁₋₈alkyl-amino, (heterocyclyl-C₁₋₈alkyl)₂-amino, (heterocyclyl-C₁₋₈alkyl)(C₁₋₈alkyl)amino, heterocyclyl-C₁₋₈alkyl-amino-C₁₋₈alkyl, (heterocyclyl-C₁₋₈alkyl)₂-amino-C₁₋₈alkyl, (heterocyclyl-C₁₋₈alkyl)(C₁₋₈alkyl)amino-C₁₋₈alkyl, heterocyclyl-oxy, heterocyclyl-carbonyl, heterocyclyl-carbonyl-oxy, C₃₋₁₄cycloalkyl, aryl-C₁₋₈alkyl-amino, (aryl-C₁₋₈alkyl)₂-amino, (aryl-C₁₋₈alkyl)(C₁₋₈alkyl)amino, aryl-C₁₋₈alkyl-amino-C₁₋₈alkyl, (aryl-C₁₋₈alkyl)₂-amino-C₁₋₈alkyl, (aryl-C₁₋₈alkyl)(C₁₋₈alkyl)amino-C₁₋₈alkyl, heteroaryl, heteroaryl-C₁₋₈alkyl, heteroaryl-C₁₋₈alkoxy, heteroaryl-amino, heteroaryl-C₁₋₈alkyl-amino, (heteroaryl-C₁₋₈alkyl)₂-amino, (heteroaryl-C₁₋₈alkyl)(C₁₋₈alkyl)amino, heteroaryl-C₁₋₈alkyl-amino-C₁₋₈alkyl, (heteroaryl-C₁₋₈alkyl)₂-amino-C₁₋₈alkyl or (heteroaryl-C₁₋₈alkyl)(C₁₋₈alkyl)amino-C₁₋₈alkyl;
[0091] wherein, each instance of heterocyclyl, C₃₋₁₄cycloalkyl, aryl and heteroaryl is optionally substituted with one, two or three R₃ substituents and optionally, with one additional R₄ substituent; or,
[0092] wherein, each instance of heterocyclyl, C₃₋₁₄cycloalkyl, aryl and heteroaryl is optionally substituted with one, two, three or four R₃ substituents;
[0093] R₂ is aryl, aryl-amino, aryl-amino-carbonyl, heterocyclyl, heteroaryl or heteroaryl-amino;
[0094] wherein, each instance of aryl, heterocyclyl and heteroaryl is optionally substituted with one, two or three R substituents and optionally, with one additional R₇ substituent;
[0095] Rₐ is, in each instance, independently selected from hydrogen, halogen, C₁₋₈alkyl or deuterium;
[0096] R_{b} is hydrogen, halogen, C₁₋₈alkyl, C₁₋₈alkoxy or deuterium;
[0097] R_{c} is hydrogen, halogen, C₁₋₈alkyl or deuterium;
[0098] R₃ is, in each instance, independently selected from cyano, halogen, hydroxy, oxo, C₁₋₈alkyl, halo-C₁₋₈alkyl, C₁₋₈alkyl-carbonyl, C₁₋₈alkoxy, halo-C₁₋₈alkoxy, C₁₋₈alkoxy-C₁₋₈alkyl, C₁₋₈alkoxy-carbonyl, amino, C₁₋₈alkyl-amino, (C₁₋₈alkyl)₂-amino, amino-C₁₋₈alkyl, C₁₋₈alkyl-amino-C₁₋₈alkyl, (C₁₋₈alkyl)₂-amino-C₁₋₈alkyl, amino-C₁₋₈alkyl-amino, C₁₋₈alkyl-amino-C₁₋₈alkyl-amino, (C₁₋₈alkyl-amino-C₁₋₈alkyl)₂-amino, (C₁₋₈alkyl)₂-amino-C₁₋₈alkyl-amino, [(C₁₋₈alkyl)₂-amino-C₁₋₈alkyl]₂-amino, (C₁₋₈alkyl-amino-C₁₋₈alkyl)(C₁₋₈alkyl)amino, [(C₁₋₈alkyl)₂-amino-C₁₋₈alkyl](C₁₋₈alkyl)amino, C₁₋₈alkoxy-C₁₋₈alkyl-amino, (C₁₋₈alkoxy-C₁₋₈alkyl)₂-amino, (C₁₋₈alkoxy-C₁₋₈alkyl)(C₁₋₈alkyl)amino, C₁₋₈alkyl-carbonyl-amino, C₁₋₈alkoxy-carbonyl-amino, hydroxy-C₁₋₈alkyl, hydroxy-C₁₋₈alkoxy-C₁₋₈alkyl, hydroxy-C₁₋₈alkyl-amino, (hydroxy-C₁₋₈alkyl)₂-amino or (hydroxy-C₁₋₈alkyl)(C₁₋₈alkyl)amino;
[0099] R₄ is C₃₋₁₄cycloalkyl, C₃₋₁₄cycloalkyl-C₁₋₈alkyl, C₃₋₁₄cycloalkyl-amino, aryl-C₁₋₈alkyl, aryl-C₁₋₈alkoxy-carbonyl, aryl-sulfonyloxy-C₁₋₈alkyl, heterocyclyl or heterocyclyl-C₁₋₈alkyl; wherein, each instance of C₃₋₁₄cycloalkyl, aryl and heterocyclyl is optionally substituted with one, two or three R₅ substituents;
[0100] R₅ is, in each instance, independently selected from halogen, hydroxy, cyano, nitro, C₁₋₈alkyl, halo-C₁₋₈alkyl, C₁₋₈alkoxy, halo-C₁₋₈alkoxy, amino, C₁₋₈alkyl-amino, (C₁₋₈alkyl)₂-amino or C₁₋₈alkyl-thio;
[0101] R₆ is, in each instance, independently selected from halogen, hydroxy, cyano, nitro, C₁₋₈alkyl, C₂₋₈alkenyl, halo-C₁₋₈alkyl, hydroxy-C₁₋₈alkyl, C₁₋₈alkoxy, halo-C₁₋₈alkoxy, C₁₋₈alkoxy-C₁₋₈alkyl, amino, C₁₋₈alkyl-amino, (C₁₋₈alkyl)₂-amino or C₁₋₈alkyl-thio; and,
[0102] R₇ is C₃₋₁₄cycloalkyl, C₃₋₁₄cycloalkyl-oxy, aryl, heterocyclyl or heteroaryl.

[0103] In another aspect, provided herein is a method of regulating the amount and type of a protein produced by a gene comprising a nucleotide sequence encoding an endogenous or non-endogenous intronic REMS in a subject, wherein the nucleotide sequence encoding the endogenous or non-endogenous intronic REMS comprises the sequence GAgtrngn (SEQ ID NO: 4), wherein r is adenine or guanine and n is any nucleotide, the method comprising administering a compound of Formula (I) to the subject, wherein Formula (I) is

[chemical structure]

[0104] wherein:
[0105] w₁ and w₅ are independently C—Rₐ or N;
[0106] w₂ is C—R_{b} or N;
[0107] w₃, w₄ and w₇ are independently C—R₁, C—R₂, C—Rₐ or N;
[0108] w₆ is C—R₁, C—R₂, C—R_{c} or N;
[0109] wherein one of w₃, w₄, w₆ and w₇ is C—R₁ and one other of w₃, w₄, w₆ and w₇ is C—R₂, provided that,
[0110] when w₃ is C—R₁, then w₆ is C—R₂ and w₄ and w₇ are independently C—Rₐ or N; or,
[0111] when w₃ is C—R₂, then w₆ is C—R₁ and w₄ and w₇ are independently C—Rₐ or N; or,
[0112] when w₄ is C—R₁, then w₇ is C—R₂ and w₃ is C—Rₐ or N and w₆ is C—R_{c} or N; or,
[0113] when w₄ is C—R₂, then w₇ is C—R₁ and w₃ is C—Rₐ or N and w₆ is C—R_{c} or N; and,
[0114] wherein any one, two or three of w₁, w₂, w₃, w₄, w₅, w₆ and w₇ may optionally be N;
[0115] R₁ is C₁₋₈alkyl, amino, C₁₋₈alkyl-amino, (C₁₋₈alkyl)₂-amino, C₁₋₈alkoxy-C₁₋₈alkyl-amino, (C₁₋₈alkoxy-C₁₋₈alkyl)₂-amino, (C₁₋₈alkoxy-C₁₋₈alkyl)(C₁₋₈alkyl)amino, amino-C₁₋₈alkyl, C₁₋₈alkyl-amino-C₁₋₈alkyl, (C₁₋₈alkyl)₂-amino-C₁₋₈alkyl, C₁₋₈alkoxy-C₁₋₈alkyl-amino-C₁₋₈alkyl, (C₁₋₈alkoxy-C₁₋₈alkyl)₂-amino-C₁₋₈alkyl, (C₁₋₈alkoxy-C₁₋₈alkyl)C₁₋₈alkyl)amino-C₁₋₈alkyl, amino-C₁₋₈alkyl-amino, (amino-C₁₋₈alkyl)₂-amino, (amino-C₁₋₈alkyl)(C₁₋₈alkyl)amino, C₁₋₈alkyl-amino-C₁₋₈alkyl-amino, (C₁₋₈alkyl-amino-C₁₋₈alkyl)₂-amino, (C₁₋₈alkyl-amino-C₁₋₈alkyl)(C₁₋₈alkyl)amino, (C₁₋₈alkyl)₂-amino-C₁₋₈alkyl-amino, [(C₁₋₈alkyl)₂-amino-C₁₋₈alkyl](C₁₋₈alkyl)amino, amino-C₁₋₈alkoxy, C₁₋₈alkyl-amino-C₁₋₈alkoxy, (C₁₋₈alkyl)₂-amino-C₁₋₈alkoxy, C₁₋₈alkoxy-C₁₋₈alkyl-amino-C₁₋₈alkoxy, C₁₋₈alkoxy-C₁₋₈alkyl-amino-C₁₋₈alkoxy, (C₁₋₈alkoxy-C₁₋₈alkyl)(C₁₋₈alkyl)amino-C₁₋₈alkoxy, amino-C₂₋₈alkenyl, C₁₋₈alkyl-amino-C₂₋₈alkenyl, (C₁₋₈alkyl)₂-amino-C₂₋₈alkenyl, amino-C₂₋₈alkynyl, C₁₋₈alkyl-amino-C₂₋₈alkynyl, (C₁₋₈alkyl)₂-amino-C₂₋₈alkynyl, halo-C₁₋₈alkyl-amino, (halo-C₁₋₈alkyl)₂-amino, (halo-C₁₋₈alkyl)(C₁₋₈alkyl)amino, hydroxy-C₁₋₈alkyl, hydroxy-C₁₋₈alkoxy-C₁₋₈alkyl, hydroxy-C₁₋₈alkyl-amino, (hydroxy-C₁₋₈alkyl)₂-amino, (hydroxy-C₁₋₈alkyl)(C₁₋₈alkyl)amino, hydroxy-C₁₋₈alkyl-amino-C₁₋₈alkyl, (hydroxy-C₁₋₈alkyl)₂-amino-C₁₋₈alkyl, (hydroxy-C₁₋₈alkyl)(C₁₋₈alkyl)amino-C₁₋₈alkyl, hydroxy-C₁₋₈alkyl-amino-C₁₋₈alkoxy, (hydroxy-C₁₋₈alkyl)₂-amino-C₁₋₈alkoxy, (hydroxy-C₁₋₈alkyl)(C₁₋₈alkyl)amino-C₁₋₈alkoxy, hydroxy-C₁₋₈alkyl-amino-C₁₋₈alkyl-amino, (hydroxy-C₁₋₈alkyl-amino-C₁₋₈alkyl)₂-amino, (hydroxy-C₁₋₈alkyl)₂-amino-C₁₋₈alkyl-amino, (hydroxy-C₁₋₈alkyl-amino-C₁₋₈alkyl)(C₁₋₈alkyl)amino, (hydroxy-C₁₋₈alkyl)(C₁₋₈alkyl)amino-C₁₋₈alkyl-amino, [(hydroxy-C₁₋₈alkyl)₂-amino-C₁₋₈alkyl](C₁₋₈alkyl)amino, [(hydroxy-C₁₋₈alkyl)(C₁₋₈alkyl)amino-C₁₋₈alkyl](C₁₋₈alkyl)amino, heterocyclyl, heterocyclyl-C₁₋₈alkyl, heterocyclyl-C₁₋₈alkoxy, heterocyclyl-amino, (heterocyclyl)(C₁₋₈alkyl)amino, heterocyclyl-amino-C₁₋₈alkyl, heterocyclyl-C₁₋₈alkyl-amino, (heterocyclyl-C₁₋₈alkyl)₂-amino, (heterocyclyl-C₁₋₈alkyl)(C₁₋₈alkyl)amino, heterocyclyl-C₁₋₈alkyl-amino-C₁₋₈alkyl, (heterocyclyl-C₁₋₈alkyl)₂-amino-C₁₋₈alkyl, (heterocyclyl-C₁₋₈alkyl)(C₁₋₈alkyl)amino-C₁₋₈alkyl, heterocyclyl-oxy, heterocyclyl-carbonyl, heterocyclyl-carbonyl-oxy, C₃₋₁₄cycloalkyl, aryl-C₁₋₈alkyl-amino, (aryl-C₁₋₈alkyl)₂-amino, (aryl-C₁₋₈alkyl)(C₁₋₈alkyl)amino, aryl-C₁₋₈alkyl-amino-C₁₋₈alkyl, (aryl-C₁₋₈alkyl)₂-amino-C₁₋₈alkyl, (aryl-C₁₋₈alkyl)(C₁₋₈alkyl)amino-C₁₋₈alkyl, heteroaryl, heteroaryl-C₁₋₈alkyl, heteroaryl-C₁₋₈alkoxy, heteroaryl-amino, heteroaryl-C₁₋₈alkyl-amino, (heteroaryl-C₁₋₈alkyl)₂-amino, (heteroaryl-C₁₋₈alkyl)(C₁₋₈alkyl)amino, heteroaryl-C₁₋₈alkyl-amino-C₁₋₈alkyl, (heteroaryl-C₁₋₈alkyl)₂-amino-C₁₋₈alkyl or (heteroaryl-C₁₋₈alkyl)(C₁₋₈alkyl)amino-C₁₋₈alkyl;
[0116] wherein, each instance of heterocyclyl, C₃₋₁₄cycloalkyl, aryl and heteroaryl is optionally substituted with one, two or three R₃ substituents and optionally, with one additional R₄ substituent; or,
[0117] wherein, each instance of heterocyclyl, C₃₋₁₄cycloalkyl, aryl and heteroaryl is optionally substituted with one, two, three or four R₃ substituents;
[0118] R₂ is aryl, aryl-amino, aryl-amino-carbonyl, heterocyclyl, heteroaryl or heteroaryl-amino;
[0119] wherein, each instance of aryl, heterocyclyl and heteroaryl is optionally substituted with one, two or three R substituents and optionally, with one additional R₇ substituent;
[0120] Rₐ is, in each instance, independently selected from hydrogen, halogen, C₁₋₈alkyl or deuterium;
[0121] R_{b} is hydrogen, halogen, C₁₋₈alkyl, C₁₋₈alkoxy or deuterium;
[0122] R_{c} is hydrogen, halogen, C₁₋₈alkyl or deuterium;
[0123] R₃ is, in each instance, independently selected from cyano, halogen, hydroxy, oxo, C₁₋₈alkyl, halo-C₁₋₈alkyl, C₁₋₈alkyl-carbonyl, C₁₋₈alkoxy, halo-C₁₋₈alkoxy, C₁₋₈alkoxy-C₁₋₈alkyl, C₁₋₈alkoxy-carbonyl, amino, C₁₋₈alkyl-amino, (C₁₋₈alkyl)₂-amino, amino-C₁₋₈alkyl, C₁₋₈alkyl-amino-C₁₋₈alkyl, (C₁₋₈alkyl)₂-amino-C₁₋₈alkyl, amino-C₁₋₈alkyl-amino, C₁₋₈alkyl-amino-C₁₋₈alkyl-amino, (C₁₋₈alkyl-amino-C₁₋₈alkyl)₂-amino, (C₁₋₈alkyl)₂-amino-C₁₋₈alkyl-amino, [(C₁₋₈alkyl)₂-amino-C₁₋₈alkyl]₂-amino, (C₁₋₈alkyl-amino-C₁₋₈alkyl)C₁₋₈alkyl)amino, [(C₁₋₈alkyl)₂-amino-C₁₋₈alkyl](C₁₋₈alkyl)amino, C₁₋₈alkoxy-C₁₋₈alkyl-amino, (C₁₋₈alkoxy-C₁₋₈alkyl)₂-amino, (C₁₋₈alkoxy-C₁₋₈alkyl)(C₁₋₈alkyl)amino, C₁₋₈alkyl-carbonyl-amino, C₁₋₈alkoxy-carbonyl-amino, hydroxy-C₁₋₈alkyl, hydroxy-C₁₋₈alkoxy-C₁₋₈alkyl, hydroxy-C₁₋₈alkyl-amino, (hydroxy-C₁₋₈alkyl)₂-amino or (hydroxy-C₁₋₈alkyl)(C₁₋₈alkyl)amino;
[0124] R₄ is C₃₋₁₄cycloalkyl, C₃₋₁₄cycloalkyl-C₁₋₈alkyl, C₃₋₁₄cycloalkyl-amino, aryl-C₁₋₈alkyl, aryl-C₁₋₈alkoxy-carbonyl, aryl-sulfonyloxy-C₁₋₈alkyl, heterocyclyl or heterocyclyl-C₁₋₈alkyl; wherein, each instance of C₃₋₁₄cycloalkyl, aryl and heterocyclyl is optionally substituted with one, two or three R₅ substituents;
[0125] R₁ is, in each instance, independently selected from halogen, hydroxy, cyano, nitro, C₁₋₈alkyl, halo-C₁₋₈alkyl, C₁₋₈alkoxy, halo-C₁₋₈alkoxy, amino, C₁₋₈alkyl-amino, (C₁₋₈alkyl)₂-amino or C₁₋₈alkyl-thio;
[0126] R₆ is, in each instance, independently selected from halogen, hydroxy, cyano, nitro, C₁₋₈alkyl, C₂₋₈alkenyl, halo-C₁₋₈alkyl, hydroxy-C₁₋₈alkyl, C₁₋₈alkoxy, halo-C₁₋₈alkoxy, C₁₋₈alkoxy-C₁₋₈alkyl, amino, C₁₋₈alkyl-amino, (C₁₋₈alkyl)₂-amino or C₁₋₈alkyl-thio; and,
[0127] R₇ is C₃₋₁₄cycloalkyl, C₃₋₁₄cycloalkyl-oxy, aryl, heterocyclyl or heteroaryl.

[0128] In another aspect, provided herein is a method of regulating the amount and type of a protein produced by a gene comprising a nucleotide sequence encoding an endogenous or non-endogenous intronic REMS in a subject, wherein the nucleotide sequence encoding the endogenous or non-endogenous intronic REMS comprises the sequence NNGAgtrngn (SEQ ID NO: 3), wherein r is adenine or guanine and n or N is any nucleotide, the method comprising administering a compound of Formula (I) to the subject, wherein Formula (I) is

[chemical structure]

[0129] wherein:
[0130] w₁ and w₅ are independently C—Rₐ or N;
[0131] w₂ is C—R_{b} or N;
[0132] w₃, w₄ and w₇ are independently C—R₁, C—R₂, C—Rₐ or N;
[0133] w₆ is C—R₁, C—R₂, C—R_{c} or N;
[0134] wherein one of w₃, w₄, w₆ and w₇ is C—R₁ and one other of w₃, w₄, w₆ and w₇ is C—R₂, provided that,
[0135] when w₃ is C—R₁, then w₆ is C—R₂ and w₄ and w₇ are independently C—Rₐ or N; or,
[0136] when w₃ is C—R₂, then w₆ is C—R₁ and w₄ and w₇ are independently C—Rₐ or N; or,
[0137] when w₄ is C—R₁, then w₇ is C—R₂ and w₃ is C—Rₐ or N and w₆ is C—R_{c} or N; or,
[0138] when w₄ is C—R₂, then w₇ is C—R₁ and w₃ is C—Rₐ or N and w₆ is C—R_{c} or N; and,
[0139] wherein any one, two or three of w₁, w₂, w₃, w₄, w₅, w₆ and w₇ may optionally be N;
[0140] R₁ is C₁₋₈alkyl, amino, C₁₋₈alkyl-amino, (C₁₋₈alkyl)₂-amino, C₁₋₈alkoxy-C₁₋₈alkyl-amino, (C₁₋₈alkoxy-C₁₋₈alkyl)₂-amino, (C₁₋₈alkoxy-C₁₋₈alkyl)(C₁₋₈alkyl)amino, amino-C₁₋₈alkyl, C₁₋₈alkyl-amino-C₁₋₈alkyl, (C₁₋₈alkyl)₂-amino-C₁₋₈alkyl, C₁₋₈alkoxy-C₁₋₈alkyl-amino-C₁₋₈alkyl, (C₁₋₈alkoxy-C₁₋₈alkyl)₂-amino-C₁₋₈alkyl, (C₁₋₈alkoxy-C₁₋₈alkyl)(C₁₋₈alkyl)amino-C₁₋₈alkyl, amino-C₁₋₈alkyl-amino, (amino-C₁₋₈alkyl)₂-amino, (amino-C₁₋₈alkyl)(C₁₋₈alkyl)amino, C₁₋₈alkyl-amino-C₁₋₈alkyl-amino, (C₁₋₈alkyl-amino-C₁₋₈alkyl)₂-amino, (C₁₋₈alkyl-amino-C₁₋₈alkyl)(C₁₋₈alkyl)amino, (C₁₋₈alkyl)₂-amino-C₁₋₈alkyl-amino, [(C₁₋₈alkyl)₂-amino-C₁₋₈alkyl](C₁₋₈alkyl)amino, amino-C₁₋₈alkoxy, C₁₋₈alkyl-amino-C₁₋₈alkoxy, (C₁₋₈alkyl)₂-amino-C₁₋₈alkoxy, C₁₋₈alkoxy-C₁₋₈alkyl-amino-C₁₋₈alkoxy, C₁₋₈alkoxy-C₁₋₈alkyl-amino-C₁₋₈alkoxy, (C₁₋₈alkoxy-C₁₋₈alkyl)(C₁₋₈alkyl)amino-C₁₋₈alkoxy, amino-C₂₋₈alkenyl, C₁₋₈alkyl-amino-C₂₋₈alkenyl, (C₁₋₈alkyl)₂-amino-C₂₋₈alkenyl, amino-C₂₋₈alkynyl, C₁₋₈alkyl-amino-C₂₋₈alkynyl, (C₁₋₈alkyl)₂-amino-C₂₋₈alkynyl, halo-C₁₋₈alkyl-amino, (halo-C₁₋₈alkyl)₂-amino, (halo-C₁₋₈alkyl)(C₁₋₈alkyl)amino, hydroxy-C₁₋₈alkyl, hydroxy-C₁₋₈alkoxy-C₁₋₈alkyl, hydroxy-C₁₋₈alkyl-amino, (hydroxy-C₁₋₈alkyl)₂-amino, (hydroxy-C₁₋₈alkyl)(C₁₋₈alkyl)amino, hydroxy-C₁₋₈alkyl-amino-C₁₋₈alkyl, (hydroxy-C₁₋₈alkyl)₂-amino-C₁₋₈alkyl, (hydroxy-C₁₋₈alkyl)C₁₋₈alkyl)amino-C₁₋₈alkyl, hydroxy-C₁₋₈alkyl-amino-C₁₋₈alkoxy, (hydroxy-C₁₋₈alkyl)₂-amino-C₁₋₈alkoxy, (hydroxy-C₁₋₈alkyl)(C₁₋₈alkyl)amino-C₁₋₈alkoxy, hydroxy-C₁₋₈alkyl-amino-C₁₋₈alkyl-amino, (hydroxy-C₁₋₈alkyl-amino-C₁₋₈alkyl)₂-amino, (hydroxy-C₁₋₈alkyl)₂-amino-C₁₋₈alkyl-amino, (hydroxy-C₁₋₈alkyl-amino-C₁₋₈alkyl)(C₁₋₈alkyl)amino, (hydroxy-C₁₋₈alkyl)(C₁₋₈alkyl)amino-C₁₋₈alkyl-amino, [(hydroxy-C₁₋₈alkyl)₂-amino-C₁₋₈alkyl](C₁₋₈alkyl)amino, [(hydroxy-C₁₋₈alkyl)(C₁₋₈alkyl)amino-C₁₋₈alkyl](C₁₋₈alkyl)amino, heterocyclyl, heterocyclyl-C₁₋₈alkyl, heterocyclyl-C₁₋₈alkoxy, heterocyclyl-amino, (heterocyclyl)(C₁₋₈alkyl)amino, heterocyclyl-amino-C₁₋₈alkyl, heterocyclyl-C₁₋₈alkyl-amino, (heterocyclyl-C₁₋₈alkyl)₂-amino, (heterocyclyl-C₁₋₈alkyl)(C₁₋₈alkyl)amino, heterocyclyl-C₁₋₈alkyl-amino-C₁₋₈alkyl, (heterocyclyl-C₁₋₈alkyl)₂-amino-C₁₋₈alkyl, (heterocyclyl-C₁₋₈alkyl)(C₁₋₈alkyl)amino-C₁₋₈alkyl, heterocyclyl-oxy, heterocyclyl-carbonyl, heterocyclyl-carbonyl-oxy, C₃₋₁₄cycloalkyl, aryl-C₁₋₈alkyl-amino, (aryl-C₁₋₈alkyl)₂-amino, (aryl-C₁₋₈alkyl)(C₁₋₈alkyl)amino, aryl-C₁₋₈alkyl-amino-C₁₋₈alkyl, (aryl-C₁₋₈alkyl)₂-amino-C₁₋₈alkyl, (aryl-C₁₋₈alkyl)(C₁₋₈alkyl)amino-C₁₋₈alkyl, heteroaryl, heteroaryl-C₁₋₈alkyl, heteroaryl-C₁₋₈alkoxy, heteroaryl-amino, heteroaryl-C₁₋₈alkyl-amino, (heteroaryl-C₁₋₈alkyl)₂-amino, (heteroaryl-C₁₋₈alkyl)(C₁₋₈alkyl)amino, heteroaryl-C₁₋₈alkyl-amino-C₁₋₈alkyl, (heteroaryl-C₁₋₈alkyl)₂-amino-C₁₋₈alkyl or (heteroaryl-C₁₋₈alkyl)(C₁₋₈alkyl)amino-C₁₋₈alkyl;
[0141] wherein, each instance of heterocyclyl, C₃₋₁₄cycloalkyl, aryl and heteroaryl is optionally substituted with one, two or three R₃ substituents and optionally, with one additional R₄ substituent; or,
[0142] wherein, each instance of heterocyclyl, C₃₋₁₄cycloalkyl, aryl and heteroaryl is optionally substituted with one, two, three or four R₃ substituents;
[0143] R₂ is aryl, aryl-amino, aryl-amino-carbonyl, heterocyclyl, heteroaryl or heteroaryl-amino;
[0144] wherein, each instance of aryl, heterocyclyl and heteroaryl is optionally substituted with one, two or three R₆ substituents and optionally, with one additional R₇ substituent;
[0145] Rₐ is, in each instance, independently selected from hydrogen, halogen, C₁₋₈alkyl or deuterium;
[0146] R_{b} is hydrogen, halogen, C₁₋₈alkyl, C₁₋₈alkoxy or deuterium;
[0147] R_{c} is hydrogen, halogen, C₁₋₈alkyl or deuterium;
[0148] R₃ is, in each instance, independently selected from cyano, halogen, hydroxy, oxo, C₁₋₈alkyl, halo-C₁₋₈alkyl, C₁₋₈alkyl-carbonyl, C₁₋₈alkoxy, halo-C₁₋₈alkoxy, C₁₋₈alkoxy-C₁₋₈alkyl, C₁₋₈alkoxy-carbonyl, amino, C₁₋₈alkyl-amino, (C₁₋₈alkyl)₂-amino, amino-C₁₋₈alkyl, C₁₋₈alkyl-amino-C₁₋₈alkyl, (C₁₋₈alkyl)₂-amino-C₁₋₈alkyl, amino-C₁₋₈alkyl-amino, C₁₋₈alkyl-amino-C₁₋₈alkyl-amino, (C₁₋₈alkyl-amino-C₁₋₈alkyl)₂-amino, (C₁₋₈alkyl)₂-amino-C₁₋₈alkyl-amino, [(C₁₋₈alkyl)₂-amino-C₁₋₈alkyl]₂-amino, (C₁₋₈alkyl-amino-C₁₋₈alkyl)(C₁₋₈alkyl)amino, [(C₁₋₈alkyl)₂-amino-C₁₋₈alkyl](C₁₋₈alkyl)amino, C₁₋₈alkoxy-C₁₋₈alkyl-amino, (C₁₋₈alkoxy-C₁₋₈alkyl)₂-amino, (C₁₋₈alkoxy-C₁₋₈alkyl)(C₁₋₈alkyl)amino, C₁₋₈alkyl-carbonyl-amino, C₁₋₈alkoxy-carbonyl-amino, hydroxy-C₁₋₈alkyl, hydroxy-C₁₋₈alkoxy-C₁₋₈alkyl, hydroxy-C₁₋₈alkyl-amino, (hydroxy-C₁₋₈alkyl)₂-amino or (hydroxy-C₁₋₈alkyl)(C₁₋₈alkyl)amino;
[0149] R₄ is C₃₋₁₄cycloalkyl, C₃₋₁₄cycloalkyl-C₁₋₈alkyl, C₃₋₁₄cycloalkyl-amino, aryl-C₁₋₈alkyl, aryl-C₁₋₈alkoxy-carbonyl, aryl-sulfonyloxy-C₁₋₈alkyl, heterocyclyl or heterocyclyl-C₁₋₈alkyl; wherein, each instance of C₃₋₁₄cycloalkyl, aryl and heterocyclyl is optionally substituted with one, two or three R₅ substituents;
[0150] R₅ is, in each instance, independently selected from halogen, hydroxy, cyano, nitro, C₁₋₈alkyl, halo-C₁₋₈alkyl, C₁₋₈alkoxy, halo-C₁₋₈alkoxy, amino, C₁₋₈alkyl-amino, (C₁₋₈alkyl)₂-amino or C₁₋₈alkyl-thio;
[0151] R₆ is, in each instance, independently selected from halogen, hydroxy, cyano, nitro, C₁₋₈alkyl, C₂₋₈alkenyl, halo-C₁₋₈alkyl, hydroxy-C₁₋₈alkyl, C₁₋₈alkoxy, halo-C₁₋₈alkoxy, C₁₋₈alkoxy-C₁₋₈alkyl, amino, C₁₋₈alkyl-amino, (C₁₋₈alkyl)₂-amino or C₁₋₈alkyl-thio; and,
[0152] R₇ is C₃₋₁₄cycloalkyl, C₃₋₁₄cycloalkyl-oxy, aryl, heterocyclyl or heteroaryl.

[0153] In specific embodiments of the aspects and embodiments described herein, the gene is, or the RNA transcript is transcribed from a gene that is selected from: ABCA1, ABCA10, ABCB7, ABCB8, ABCC1, ABCC3, ABHD10, ABL2, ABLIM3, ACACA, ACADVL, ACAT2, ACTA2, ADAL, ADAM12, ADAM15, ADAM17, ADAM33, ADAMTS1, ADCY3, ADD1, ADGRG6, ADH6, ADHFE1, AFF2, AFF3, AGK, AGPAT3, AGPAT4, AGPS, AHCYL2, AHDC1, AHRR, AJUBA, AK021888, AK310472, AKAP1, AKAP3, AKAP9, AKNA, ALCAM, ALDH4A1, AMPD2, ANK1, ANK2, ANK3, ANKFY1, ANKHD1-EIF4EBP3, ANKRA2, ANKRD17, ANKRD33B, ANKRD36, ANKS6, ANP32A, ANXA11, ANXA6, AP2B1, AP4B1-AS1, APAF1, APIP, APLP2, APP, APPL2, APTX, ARHGAP1, ARHGAP12, ARHGAP22, ARHGEF16, ARID1A, ARID2, ARID5B, ARL9, ARL15, ARMCX3, ARMCX6, ASAP1, ASIC1, ASL, ASNS, ASPH, ATAD2B, ATF7IP, ATG5, ATG9A, ATMIN, ATP2A3, ATP2C1, ATXN1, ATXN3, AURKA, AXIN1, B3GALT2, B3GNT6, B4GALT2, BACE1, BAG2, BASP1, BC033281, BCAR3, BCL2L15, BCYRN1, BECN1, BEND6, BHMT2, BICD1, BIN1, BIN3-IT1, BIRC3, BIRC6, BNC1, BRD2, BRPF1, BSCL2, BTBD10, BTG2, BTN3A1, BZW1, C1orf86, C10orf54, C11orf30, C11orf70, C11orf73, C11orf94, C12orf4, C12orf56, C14orf132, C17orf76-AS1, C19orf47, C3, C4orf27, C5orf24, C6orf48, C7orf31, C8orf34, C8orf44, C8orf44-SGK3, C8orf88, C9orf69, CA13, CA3, CAB39, CACNA2D2, CACNB1, CADM1, CALU, CAMKK1, CAND2, CAPNS1, CASC3, CASP7, CASP8AP2, CAV1, CCAR1, CCDC77, CCDC79, CCDC88A, CCDC92, CCDC122, CCER2, CCNF, CCT6A, CD276, CD46, CDC25B, CDC40, CDC42BPA, CDCA7, CDH11, CDH13, CDK11B, CDK16, CDKAL1, CECR7, CELSR1, CEMIP, CENPI, CEP112, CEP170, CEP192, CEP68, CFH, CFLAR, CHD8, CHEK1, CIITA, CIZ1, CLDN23, CLIC1, CLK4, CLTA, CMAHP, CNGA4, CNOT1, CNRIP1, CNTD1, COG1, COL1A1, COL11A1, COL12A1, COL14A1, COL15A1, COL5A1, COL5A3, COL6A1, COL6A6, COL8A1, COLEC12, COMP, COPS7B, CPA4, CPEB2, CPQ, CPSF4, CREB5, CRISPLD2, CRLF1, CRLS1, CRTAP, CRYBG3, CRYL1, CSDE1, CSNK1A1, CSNK1E, CSNK1G1, CTDSP2, CTNND1, CUL2, CUL4A, CUX1, CYB5B, CYB5R2, CYBRD1, CYGB, CYPIB1, CYP51A1, DAB2, DACT1, DAGLB, DARS, DAXX, DCAF10, DCAF11, DCAF17, DCBLD2, DCLK1, DCN, DCUN1D4, DDAH1, DDAH2, DDHD2, DDIT4L, DDR1, DDX39B, DDX42, DDX50, DEGS1, DENND1A, DENND1B, DENND5A, DEPTOR, DFNB59, DGCR2, DGKA, DHCR24, DHCR7, DHFR, DHX9, DIAPH1, DIAPH3, DIRAS3, DIS3L, DKFZp434M1735, DKK3, DLC1, DLG5, DLGAP4, DNAH8, DNAJC13, DNAJC27, DNM2, DNMBP, DOCK1, DOCK11, DPP8, DSEL, DST, DSTN, DYNC1I1, DYRK1A, DZIP1L, EBF1, EEA1, EEF1A1, EFCAB14, EFEMP1, EGR1, EGR3, EHMT2, EIF2B3, EIF4G1, EIF4G2, EIF4G3, ELF2, ELN, ELP4, EMX2OS, ENAH, ENG, ENPP1, ENPP2, ENSA, EP300, EPN1, EPT1, ERC1, ERCC1, ERCC8, ERGIC3, ERLIN2, ERRFI1, ESM1, ETV5, EVC, EVC2, EXO1, EXTL2, EYA3, F2R, FADS1, FADS2, FAF1, FAIM, FAM111A, FAM126A, FAM13A, FAM160A1, FAM162A, FAM174A, FAM198B, FAM20A, FAM219A, FAM219B, FAM3C, FAM46B, FAM65A, FAM65B, FAP, FARP1, FBLN2, FBN2, FBXO9, FBXL6, FBXO10, FBXO18, FBXO31, FBXO34, FBXO9, FCHO1, FDFT1, FDPS, FER, FEZ1, FGD5-AS1, FGFR2, FGFRL1, FGL2, FHOD3, FLII, FLNB, FLT1, FN1, FNBP1, FOCAD, FOS, FOSB, FOSL1, FOXK1, FOXM1, FRAS1, FSCN2, FUS, FYN, GABPB1, GAL3ST4, GALC, GALNT1, GALNT15, GAS7, GATA6, GBA2, GBGT1, GCFC2, GCNT1, GDF6, GGACT, GGCT, GHDC, GIGYF2, GJC1, GLCE, GMIP, GNA13, GNAQ, GNAS, GNL3L, GOLGA2, GOLGA4, GOLGB1, GORASP1, GPR1, GPR183, GPR50, GPR89A, GPRC5A, GPRC5B, GPSM2, GREM1, GRK6, GRTP1, GSE1, GTF2H2B, GUCA1B, GULP1, GXYLT1, HAPLN1, HAPLN2, HAS2, HAS3, HAT1, HAUS3, HAUS6, HAVCR2, HDAC5, HDAC7, HDX, HECTD2-AS1, HEG1, HEPH, HEY1, HLA-A, HLA-E, HLTF, HMGA1, HMGA2, HMGB1, HMGCR, HMGN3-AS1, HMGCS1, HOOK3, HMOX1, HNMT, HNRNPR, HNRNPUL1, HP1BP3, HPS1, HRH1, HSD17B12, HSD17B4, HSPA1L, HTATIP2, HTT, TARS, IDH1, IDI1, IFT57, TGDCC4, TGF2BP2, TGF2R, TGFBP3, IL16, IL6ST, INA, INHBA, INPP5K, INSIG1, INTU, IQCE, IQCG, ITGA11, ITGA8, ITGAV, ITGB5, ITGB8, ITIH1, ITM2C, ITPKA, ITSN1, IVD, KANSL3, KAT6B, KCNK2, KCNS1, KCNS2, KDM6A, KDSR, KIAA1033, KIAA1143, KIAA1199, KIAA1456, KIAA1462, KIAA1522, KIAA1524, KIAA1549, KIAA1715, KIAA1755, KIF14, KIF2A, KIF3A, KIT, KLC1, KLC2, KLF17, KLF6, KLHL7, KLRG1, KMT2D, KRT7, KRT18, KRT19, KRT34, KRTAP1-1, KRTAP1-5, KRTAP2-3, L3MBTL2, LAMA2, LAMB1, LAMB2P1, LARP4, LARP7, LATS2, LDLR, LEMD3, LETM2, LGALS8, LGI2, LGR4, LHX9, LIMS1, LINC00341, LINC00472, LINC00570, LINC00578, LINC00607, LINC00657, LINC00678, LINC00702, LINC00886, LINC00961, LINC01011, LINC01118, LINC01204, LMAN2L, LMO7, LMOD1, LOC400927, LONP1, LOX, LRBA, LRCH4, LRIG1, LRP4, LRP8, LRRC32, LRRC39, LRRC42, LRRC8A, LSAMP, LSS, LTBR, LUC7L2, LUM, LYPD1, LYRM1, LZTS2, MADD, MAFB, MAGED4, MAGED4B, MAMDC2, MAN1A2, MAN2A1, MAN2C1, MAP4K4, MAPK13, MASP1, MB, MB21D2, MBD1, MBOAT7, MC4R, MCM10, MDM2, MED1, MED13L, MEDAG, MEF2D, MEGF6, MEIS2, MEMO1, MEPCE, MFGE8, MFN2, MIAT, MICAL2, MINPP1, MIR612, MKL1, MKLN1, MKNK2, MLLT4, MLLT10, MLST8, MMAB, MMP10, MMP24, MMS19, MMS22L, MN1, MOXD1, MPPE1, MPZL1, MRPL3, MRPL45, MRPL55, MRPS28, MRVI1, MSANTD3, MSC, MSH2, MSH4, MSH6, MSL3, MSMO1, MSRB3, MTAP, MTERF3, MTERFD1, MTHFD1L, MTMR9, MTRR, MUM1, MVD, MVK, MXRA5, MYADM, MYCBP2, MYLK, MYO1D, MYO9B, MYOF, NA, NAA35, NAALADL2, NADK, NAE1, NAGS, NASP, NAV1, NAV2, NCOA1, NCOA3, NCOA4, NCSTN, NDNF, NELFA, NEO1, NEURLIB, NF2, NFE2L1, NFX1, NGF, NGFR, NHLH1, NID1, NID2, NIPA1, NKX3-1, NLN, NOL10, NOMO3, NOTCH3, NOTUM, NOVA2, NOX4, NPEPPS, NRD1, NREP, NRG1, NRROS, NSUN4, NT5C2, NT5E, NTNG1, NUDT4, NUP153, NUP35, NUP50, NUPL1, NUSAP1, OCLN, ODF2, OLR1, OS9, OSBPL6, OSBPL10, OSMR, OXCT1, OXCT2, P4HA1, P4HB, PABPC1, PAIP2B, PAK4, PAPD4, PARD3, PARN, PARP14, PARP4, PARVB, PBLD, PCBP2, PCBP4, PCDHGB3, PCGF3, PCM1, PCMTD2, PCNXL2, PCSK9, PDE1C, PDE4A, PDE5A, PDE7A, PDGFD, PDGFRB, PDLIM7, PDS5B, PDXDC1, PEAR1, PEPD, PEX5, PFKP, PHACTR3, PHF19, PHF8, PHRF1, PHTF2, P14K2A, PIEZO1, PIGN, PIGU, PIK3C2B, PIK3CD, PIK3R1, PIKFYVE, PIM2, PITPNA, PITPNB, PITPNM1, PTTPNM3, PLAU, PLEC, PLEK2, PLEKHA1, PLEKHA6, PLEKHB2, PLEKHH2, PLSCR1, PLSCR3, PLXNB2, PLXNC1, PMS1, PNISR, PODN, POLE3, POLN, POLR1A, POLR3D, POMT2, POSTN, POU2F1, PPAPDC1A, PPARA, PPARG, PPHLN1, PPIP5K1, PPIP5K2, PPM1E, PPP1R12A, PPP1R26, PPP3CA, PPP6R1, PPP6R2, PRKACB, PRKCA, PRKDC, PRKG1, PRMT1, PRNP, PRPF31, PRPH2, PRRG4, PRSS23, PRUNE2, PSMA4, PSMC1, PSMD6, PSMD6-AS2, PTGIS, PTK2B, PTPN14, PTX3, PUF60, PUS7, PVR, PXK, PXN, QKI, RAB23, RAB2B, RAB30, RAB34, RAB38, RAB44, RAD1, RAD9B, RAD23B, RAF1, RALB, RAPlA, RAP1GDS1, RAPGEF1, RARG, RARS, RARS2, RASSF8, RBBP8, RBCK1, RBFOX2, RBKS, RBM10, RCC1, RDX, RERE, RFTN1, RFWD2, RFX3-AS1, RGCC, RGS10, RGS3, RIF1, RNF14, RNF19A, RNF38, RNFT1, ROR1, ROR2, RPA1, RPL10, RPS10, RPS6KB2, RPS6KC1, RRBP1, RWDD4, SAMD4A, SAMD9, SAMD9L, SAR1A, SART3, SCAF4, SCAF8, SCARNA9, SCD, SCLT1, SCO1, SDCBP, SEC14L1, SEC22A, SEC24A, SEC24B, SEC61A1, SENP6, SEPT9, SERGEF, SERPINE2, SF1, SGK3, SGOL2, SH3RF1, SH3YL1, SHROOM3, SIGLEC10, SKA2, SKIL, SLC12A2, SLC24A3, SLC25A17, SLC35F3, SLC39A3, SLC39A10, SLC4A4, SLC4A11, SLC41A1, SLC44A2, SLC46A2, SLC6A15, SLC7A6, SLC7A8, SLC7A11, SLC9A3, SLIT3, SMARCA4, SMARCC2, SMC4, SMC6, SMCHD1, SMG1, SMG1P3, SMN2, SMPD4, SMTN, SMYD3, SMYD5, SNAP23, SNED1, SNHG16, SNX7, SNX14, SOCS2, SON, SORBS2, SORCS2, SOS2, SOX7, SPATA18, SPATA20, SPATA5, SPATS2, SPDYA, SPEF2, SPG20, SPIDR, SPRED2, SPRYD7, SQLE, SQRDL, SQSTM1, SRCAP, SREBF1, SREK1, SRGAP1, SRRM1, SRSF3, STAC2, STARD4, STAT1, STAT3, STAT4, STAU1, STC2, STEAP2, STK32B, STRIP1, STRN3, STRN4, STS, STX16, STXBP6, SULF1, SUPT20H, SVEP1, SYNE1, SYNE2, SYNGR2, SYNPO, SYNPO2, SYNPO2L, SYT15, SYTL2, TACC1, TAF2, TAGLN3, TANC2, TANGO6, TARBP1, TARS, TASP1, TBC1D15, TBL2, TCF12, TCF4, TCF7L2, TENC1, TENM2, TEP1, TET3, TEX21P, TFCP2, TGFA, TGFB2, TGFB3, TGFB1, TGFBR1, TGFBRAP1, TGM2, THADA, THAP4, THBS2, THRB, TIAM1, TIMP2, TJP2, TLE3, TLK1, TMC3, TMEM102, TMEM119, TMEM134, TMEM154, TMEM189-UBE2V1, TMEM214, TMEM256-PLSCR3, TMEM47, TMEM50B, TMEM63A, TNC, TNFAIP3, TNFAIP8L3, TNFRSF12A, TNFRSF14, TNIP1, TNKS1BP1, TNPO3, TNRC18P1, TNRC6A, TNS1, TNS3, TNXB, TOE1, TOMM40, TOMM5, TOPORS, TP53AIP1, TP531NP1, TPRG1, TRAF3, TRAK1, TRAPPC12, TRIB1, TRIM2, TRIM23, TRIM26, TRIM28, TRIM65, TRIM66, TRMT1L, TRPC4, TRPS1, TSC2, TSHZ1, TSHZ2, TSPAN11, TSPAN18, TSPAN2, TSPAN7, TSSK3, TTC7A, TTC7B, TUBB2C, TUBB3, TUBE1, TXNIP, TXNL1, TXNRD1, TYW5, U2SURP, UBAP2L, UBE2G2, UBE2V1, UBQLN4, UCHL5, UHMK1, UHRF1BP1L, UNC5B, URGCP, USP19, USP7, USP27X, UVRAG, VANGL1, VARS2, VAV2, VCL, VIM-AS1, VIPAS39, VPS13A, VPS29, VPS41, VPS51, VSTM2L, VWA8, VWF, WDR19, WDR27, WDR37, WDR48, WDR91, WIPF1, WISP1, WNK1, WNT5B, WNT10B, WSB1, WWTR1, XIAP, XRN2, YAP1, YDJC, YES1, YPEL5, YTHDF3, Z24749, ZAK, ZBTB10, ZBTB24, ZBTB26, ZBTB7A, ZC3H12C, ZC3H14, ZC3H18, ZCCHC5, ZCCHC8, ZCCHC11, ZEB1, ZEB2, ZFAND1, ZFAND5, ZFP82, ZHX3, ZMIZ1, ZMIZ1-AS1, ZMYM2, ZNF12, ZNF138, ZNF148, ZNF212, ZNF219, ZNF227, ZNF232, ZNF24, ZNF268, ZNF28, ZNF281, ZNF335, ZNF350, ZNF37A, ZNF37BP, ZNF395, ZNF431, ZNF583, ZNF621, ZNF652, ZNF655, ZNF660, ZNF674, ZNF680, ZNF74, ZNF764, ZNF778, ZNF780A, ZNF79, ZNF827, ZNF837, ZNF839 or ZNF91.

[0154] In another specific embodiment of the aspects and embodiments described herein, the gene is, or the RNA transcript is transcribed from a gene that is selected from: ABCA10, ABCB8, ABCC3, ACTA2, ADAL, ADAMTS1, ADCY3, ADD1, ADGRG6, ADH6, ADHFE1, AFF3, AGPAT4, AKAP3, ANK1, ANK3, ANKRA2, ANKRD33B, ANKRD36, AP4B1-AS1, APIP, ARHGAP1, ARHGAP12, ARHGEF16, ARID5B, ARL15, ARL9, ARMCX6, ASIC1, ATG5, ATP2A3, ATXN1, B3GALT2, B3GNT6, BCL2L15, BCYRN1, BECN1, BHMT2, BIN3-IT1, BIRC3, BIRC6, BTG2, BTN3A1, C10orf54, C11orf70, C11orf94, C12orf4, C12orf56, C14orf132, C19orf47, C1orf86, C3, C7orf31, C8orf34, C8orf44, C8orf44-SGK3, C8orf88, CA13, CA3, CACNA2D2, CACNB1, CADM1, CAND2, CASP7, CCDC122, CCDC79, CCER2, CCNF, CECR7, CELSR1, CEMIP, CENPI, CEP112, CEP170, CEP192, CFH, CHEK1, CIITA, CLDN23, CLTA, CMAHP, CNGA4, CNRIP1, CNTD1, COL11A1, COL14A1, COL15A1, COL5A1, COL5A3, COL6A6, COL8A1, COLEC12, COMP, CPA4, CPQ, CPSF4, CRISPLD2, CRLF1, CRYBG3, CRYL1, CSNK1E, CSNK1G1, CYB5R2, CYGB, CYP1B1, DAGLB, DCAF17, DCLK1, DCN, DDIT4L, DDX50, DEGS1, DEPTOR, DFNB59, DIRAS3, DLG5, DLGAP4, DNAH8, DNAJC13, DNAJC27, DNMBP, DOCK11, DYNC1I1, DYRK1A, DZIP1L, EFEMP1, EGR3, ELN, ELP4, EMX2OS, ENAH, ENPP1, EP300, ERCC1, ERCC8, ERGIC3, ERLIN2, ERRFI1, ESM1, EVC, EVC2, F2R, FAIM, FAM126A, FAM13A, FAM160A1, FAM162A, FAM174A, FAM20A, FAM46B, FAM65B, FAP, FARP1, FBLN2, FBN2, FBXL6, FCHO1, FGFR2, FGL2, FLT1, FRAS1, FSCN2, GAL3ST4, GALNT15, GATA6, GBGT1, GCNT1, GDF6, GGACT, GLCE, GNAQ, GPR183, GPR50, GPRC5A, GPRC5B, GRTP1, GUCA1B, GULP1, GXYLT1, HAPLN1, HAPLN2, HAS3, HAVCR2, HDAC5, HDX, HECTD2-AS1, HEPH, HEY1, HMGA2, HMGN3-AS1, HNMT, HOOK3, HPS1, HSPA1L, HTATIP2, IFT57, IGDCC4, IGF2R, IGFBP3, IL16, INA, INPP5K, INTU, IQCG, ITGA11, ITGA8, ITGB8, ITIH1, ITPKA, IVD, KAT6B, KCNS1, KCNS2, KDM6A, KDSR, KIAA1456, KIAA1462, KIAA1755, KIT, KLF17, KLRG1, KMT2D, KRT7, KRTAP1-1, KRTAP1-5, L3MBTL2, LAMB2P1, LETM2, LGI2, LGR4, LHX9, LINC00472, LINC00570, LINC00578, LINC00607, LINC00678, LINC00702, LINC00886, LINC00961, LINC01011, LINC01118, LINC01204, LMOD1, LOC400927, LRBA, LRP4, LRRC32, LRRC39, LRRC42, LSAMP, LUM, LYPD1, LYRM1, MAFB, MAMDC2, MAN2A1, MAN2C1, MAPK13, MASP1, MB, MB21D2, MC4R, MCM10, MED13L, MEGF6, MFN2, MIAT, MIR612, MLLT10, MMP10, MMP24, MN1, MOXD1, MRPL45, MRPL55, MRPS28, MRVI1, MSH4, MTERF3, MXRA5, MYCBP2, NA, NAALADL2, NAE1, NAGS, NDNF, NGF, NGFR, NHLH1, NLN, NOTCH3, NOTUM, NOVA2, NOX4, NRROS, OCLN, OLR1, OSBPL10, OXCT1, OXCT2, PAIP2B, PBLD, PDE1C, PDE5A, PDGFD, PDGFRB, PDS5B, PEAR1, PHACTR3, PIGN, PIK3CD, PIK3R1, PIKFYVE, PIM2, PITPNM3, PLEK2, PLEKHA1, PLEKHA6, PLEKHH2, PLSCR1, PNISR, PODN, POLN, POLR1A, POMT2, PPARG, PPIP5K2, PPM1E, PPP1R26, PPP3CA, PRKCA, PRKG1, PRPF31, PRPH2, PRRG4, PRUNE2, PSMD6-AS2, PTGIS, PTX3, PXK, RAB30, RAB38, RAB44, RAD9B, RAF1, RAPGEF1, RARS, RARS2, RBBP8, RBKS, RDX, RERE, RFX3-AS1, RGCC, ROR1, ROR2, RPA1, RPS10, RPS6KB2, SAMD4A, SCARNA9, SEC24A, SENP6, SERGEF, SGK3, SH3YL1, SHROOM3, SIGLEC10, SKA2, SLC12A2, SLC24A3, SLC35F3, SLC39A10, SLC44A2, SLC46A2, SLC4A11, SLC6A15, SLC7A11, SLC9A3, SLIT3, SMG1P3, SMTN, SNED1, SNX7, SORBS2, SORCS2, SOX7, SPATA18, SPATA5, SPDYA, SPEF2, SPIDR, SPRYD7, SRGAP1, SRRM1, STAC2, STAT4, STK32B, STRN4, STS, STXBP6, SULF1, SVEP1, SYNGR2, SYNPO, SYNPO2, SYNPO2L, TAGLN3, TANGO6, TASP1, TCF12, TCF4, TGFA, TGFB2, TGFB3, TGM2, THBS2, TIAM1, TMC3, TMEM102, TMEM119, TMEM134, TMEM189-UBE2V1, TMEM214, TMEM256-PLSCR3, TMEM50B, TNFAIP8L3, TNFRSF14, TNRC18P1, TNRC6A, TNXB, TP53AIP1, TPRG1, TRIM66, TRPC4, TSHZ2, TSPAN11, TSPAN18, TSPAN7, TSSK3, TTC7B, TUBE1, TXNIP, TYW5, URGCP, USP27X, UVRAG, VAV2, VIM-AS1, VPS41, VSTM2L, VWF, WDR27, WDR91, WISP1, WNK1, WNT10B, YDJC, ZBTB26, ZCCHC5, ZCCHC8, ZFP82, ZMIZ1-AS1, ZNF138, ZNF212, ZNF232, ZNF350, ZNF431, ZNF660, ZNF680, ZNF79, or ZNF837.

[0155] In another specific embodiment of the aspects and embodiments described herein, the gene is, or the RNA transcript is transcribed from a gene that is not described in International Publication No. WO 2015/105657. In another specific embodiment of the aspects and embodiments described herein, the gene is, or the RNA transcript is transcribed from a gene that is not described in International Publication No. WO 2016/196386. In another specific embodiment of the aspects and embodiments described herein, the gene is, or the RNA transcript is transcribed from a gene that is not described in International Publication No. WO 2015/105657 and not described in International Publication No. WO 2016/196386.

[0156] In another specific embodiment of the aspects and embodiments described herein, the gene is, or the RNA transcript is transcribed from a gene that is selected from: ABCA1, ABCB7, ABCC1, ABHD10, ABL2, ABLIM3, ACACA, ACADVL, ACAT2, ADAM12, ADAM15, ADAM17, ADAM33, AFF2, AGK, AGPAT3, AGPS, AHCYL2, AHDC1, AHRR, AJUBA, AK021888, AK310472, AKAP1, AKAP9, AKNA, ALCAM, ALDH4A1, AMPD2, ANK2, ANKFY1, ANKHD1-EIF4EBP3, ANKRD17, ANKS6, ANP32A, ANXA11, ANXA6, AP2B1, APAF1, APLP2, APP, APPL2, APTX, ARHGAP22, ARID1A, ARTD2, ARMCX3, ASAP1, ASL, ASNS, ASPH, ATAD2B, ATF7IP, ATG9A, ATMIN, ATP2C1, ATXN3, AURKA, AXIN1, B4GALT2, BACE1, BAG2, BASP1, BC033281, BCAR3, BEND6, BICD1, BIN1, BNC1, BRD2, BRPF1, BSCL2, BTBD10, BZW1, C11orf30, C11orf73, C17orf76-AS1, C4orf27, C5orf24, C6orf48, C9orf69, CAB39, CALU, CAMKK1, CAPNS1, CASC3, CASP8AP2, CAV1, CCAR1, CCDC77, CCDC88A, CCDC92, CCT6A, CD276, CD46, CDC25B, CDC40, CDC42BPA, CDCA7, CDH11, CDH13, CDK11B, CDK16, CDKAL1, CEP68, CFLAR, CHD8, CIZ1, CLIC1, CLK4, CNOT1, COG1, COL12A1, COL1A1, COL6A1, COPS7B, CPEB2, CREB5, CRLS1, CRTAP, CSDE1, CSNK1A1, CTDSP2, CTNND1, CUL2, CUL4A, CUX1, CYB5B, CYBRD1, CYP51A1, DAB2, DACT1, DARS, DAXX, DCAF10, DCAF11, DCBLD2, DCUN1D4, DDAH1, DDAH2, DDHD2, DDR1, DDX39B, DDX42, DENND1A, DENND1B, DENND5A, DGCR2, DGKA, DHCR24, DHCR7, DHFR, DHX9, DIAPH1, DIAPH3, DIS3L, DKFZp434M1735, DKK3, DLC1, DNM2, DOCK1, DPP8, DSEL, DST, DSTN, EBF1, EEA1, EEF1A1, EFCAB14, EGR1, EHMT2, EIF2B3, EIF4G1, EIF4G2, EIF4G3, ELF2, ENG, ENPP2, ENSA, EPN1, EPT1, ERC1, ERGTC3, ETV5, EXO1, EXTL2, EYA3, FADS1, FADS2, FAF1, FAM111A, FAM198B, FAM219A, FAM219B, FAM3C, FAM65A, FBXO10, FBXO18, FBXO31, FBXO34, FBXO9, FDFT1, FDPS, FER, FEZ1, FGD5-AS1, FGFRL1, FHOD3, FLII, FLNB, FN1, FNBP1, FOCAD, FOS, FOSB, FOSL1, FOXK1, FOXM1, FUS, FYN, GABPB1, GALC, GALNT1, GAS7, GBA2, GCFC2, GGCT, GHDC, GIGYF2, GJC1, GMIP, GNA13, GNAS, GNL3L, GOLGA2, GOLGA4, GOLGB1, GORASP1, GPR1, GPR89A, GPSM2, GREM1, GRK6, GSE1, GTF2H2B, HAS2, HAT1, HAUS3, HAUS6, HDAC7, HEG1, HLA-A, HLA-E, HLTF, HMGA1, HMGB1, HMGCR, HMGCS1, HMOX1, HNRNPR, HNRNPUL1, HP1BP3, HRH1, HSD17B12, HSD17B4, HTT, IARS, IDH1, IDI1, IGF2BP2, IL6ST, INHBA, INSIG1, IQCE, ITGAV, ITGB5, ITM2C, ITSN1, KANSL3, KCNK2, KIAA1033, KIAA1143, KIAA1199, KIAA1522, KIAA1524, KIAA1549, KIAA1715, KIF14, KIF2A, KIF3A, KLC1, KLC2, KLF6, KLHL7, KRT18, KRT19, KRT34, KRTAP2-3, LAMA2, LAMB1, LARP4, LARP7, LATS2, LDLR, LEMD3, LGALS8, LIMS1, LINC00341, LINC00657, LMAN2L, LMO7, LONP1, LOX, LRCH4, LRIG1, LRP8, LRRC8A, LSS, LTBR, LUC7L2, LZTS2, MADD, MAGED4, MAGED4B, MAN1A2, MAP4K4, MBD1, MBOAT7, MDM2, MED1, MEDAG, MEF2D, MEIS2, MEMO1, MEPCE, MFGE8, MICAL2, MINPP1, MKL1, MKLN1, MKNK2, MLLT4, ML ST8, MMAB, MMS19, MMS22L, MPPE1, MPZL1, MRPL3, MSANTD3, MSC, MSH2, MSH6, MSL3, MSMO1, MSRB3, MTAP, MTERFD1, MTHFD1L, MTMR9, MTRR, MUM1, MVD, MVK, MYADM, MYLK, MYO1D, MYO9B, MYOF, NAA35, NADK, NASP, NAV1, NAV2, NCOA1, NCOA3, NCOA4, NCSTN, NELFA, NEO1, NEURLIB, NF2, NFE2L1, NFX1, NID1, NID2, NIPA1, NKX3-1, NOL10, NOMO3, NPEPPS, NRD1, NREP, NRG1, NSUN4, NT5C2, NT5E, NTNG1, NUDT4, NUP153, NUP35, NUP50, NUPL1, NUSAP1, ODF2, OS9, OSBPL6, OSMR, P4HA1, P4HB, PABPC1, PAK4, PAPD4, PARD3, PARN, PARP14, PARP4, PARVB, PCBP2, PCBP4, PCDHGB3, PCGF3, PCM1, PCMTD2, PCNXL2, PCSK9, PDE4A, PDE7A, PDLIM7, PDXDC1, PEPD, PEX5, PFKP, PHF19, PHF8, PHRF1, PHTF2, PI4K2A, PIEZO1, PIGU, PIK3C2B, PITPNA, PITPNB, PITPNM1, PLAU, PLEC, PLEKHB2, PLSCR3, PLXNB2, PLXNC1, PMS1, POLE3, POLR3D, POSTN, POU2F1, PPAPDC1A, PPARA, PPHLN1, PPIP5K1, PPPIR12A, PPP6R1, PPP6R2, PRKACB, PRKDC, PRMT1, PRNP, PRSS23, PSMA4, PSMC1, PSMD6, PTK2B, PTPN14, PUF60, PUS7, PVR, PXN, QKI, RAB23, RAB2B, RAB34, RAD1, RAD23B, RALB, RAPlA, RAP1GDS1, RARG, RASSF8, RBCK1, RBFOX2, RBM10, RCC1, RFTN1, RFWD2, RGS10, RGS3, RIF1, RNF14, RNF19A, RNF38, RNFT1, RPL10, RPS6KC1, RRBP1, RWDD4, SAMD9, SAMD9L, SAR1A, SART3, SCAF4, SCAF8, SCD, SCLT1, SCO1, SDCBP, SEC14L1, SEC22A, SEC24B, SEC61 A1, SEPT9, SERPINE2, SF1, SGOL2, SH3RF1, SKIL, SLC25A17, SLC39A3, SLC41A1, SLC4A4, SLC7A6, SLC7A8, SMARCA4, SMARCC2, SMC4, SMC6, SMCHD1, SMG1, SMN2, SMPD4, SMYD3, SMYD5, SNAP23, SNHG16, SNX14, SOCS2, SON, SOS2, SPATA20, SPATS2, SPG20, SPRED2, SQLE, SQRDL, SQSTM1, SRCAP, SREBF1, SREK1, SRSF3, STARD4, STAT1, STAT3, STAU1, STC2, STEAP2, STRIP1, STRN3, STX16, SUPT20H, SYNE1, SYNE2, SYT15, SYTL2, TACC1, TAF2, TANC2, TARBP1, TARS, TBC1D15, TBL2, TCF7L2, TENC1, TENM2, TEP1, TET3, TFCP2, TGFB1, TGFBR1, TGFBRAP1, THADA, THAP4, THRB, TIMP2, TJP2, TLE3, TLK1, TMEM154, TMEM47, TMEM63A, TNC, TNFAIP3, TNFRSF12A, TNIP1, TNKS1BP1, TNPO3, TNS1, TNS3, TOE1, TOMM40, TOMM5, TOPORS, TP53INP1, TRAF3, TRAK1, TRAPPC12, TRIB1, TRIM2, TRIM23, TRIM26, TRIM28, TRIM65, TRMT1L, TRPS1, TSC2, TSHZ1, TSPAN2, TTC7A, TUBB2C, TUBB3, TXNL1, TXNRD1, U2SURP, UBAP2L, UBE2G2, UBE2V1, UBQLN4, UCHL5, UHMK1, UHRF1BP1L, UNC5B, USP19, USP7, VANGL1, VARS2, VCL, VIPAS39, VPS13A, VPS29, VPS51, VWA8, WDR19, WDR37, WDR48, WIPF1, WNT5B, WSB1, WWTR1, XIAP, XRN2, YAP1, YES1, YPEL5, YTHDF3, Z24749, ZAK, ZBTB10, ZBTB24, ZBTB7A, ZC3H12C, ZC3H14, ZC3H18, ZCCHC11, ZEB1, ZEB2, ZFAND1, ZFAND5, ZHX3, ZMIZ1, ZMYM2, ZNF12, ZNF148, ZNF219, ZNF227, ZNF24, ZNF268, ZNF28, ZNF281, ZNF335, ZNF37A, ZNF37BP, ZNF395, ZNF583, ZNF621, ZNF652, ZNF655, ZNF674, ZNF74, ZNF764, ZNF778, ZNF780A, ZNF827, ZNF839 or ZNF91.

[0157] In another specific embodiment of the aspects and embodiments described herein, the gene is, or the RNA transcript is transcribed from a gene that is selected from: ABCB8, ANKRD36, APLP2, ARHGAP12, ARMCX6, ASAP1, ATG5, AXIN1, BIRC6, C1orf86, CDC42BPA, CLTA, DYRK1A, ERGIC3, FBXL6, FOXM1, GGCT, KAT6B, KDM6A, KIF3A, KMT2D, LARP7, LYRM1, MADD, MAN2C1, MRPL55, MYCBP2, MYO9B, PNISR, RAPlA, RAPGEF1, SENP6, SH3YL1, SLC25A17, SMN2, SREK1, STRN3, TAF2, TMEM134, VPS29, ZFAND1 or ZNF431.

[0158] In another specific embodiment of the aspects and embodiments described herein, the gene is, or the RNA transcript is transcribed from a gene that is selected from: ABCB8, ANKRD36, ARHGAP12, ARMCX6, ATG5, BIRC6, C1orf86, CLTA, DYRK1A, FBXL6, KAT6B, KDM6A, KMT2D, LYRM1, MAN2C1, MRPL55, MYCBP2, PNISR, RAPGEF1, SENP6, SH3YL1, TMEM134 or ZNF431.

[0159] In another specific embodiment of the aspects and embodiments described herein, the gene is, or the RNA transcript is transcribed from a gene that is selected from: ABCA10, ABCC1, ACTA2, ADAL, ADAM12, ADAMTS1, ADAMTS5, ADD1, ADGRG6, ADH6, ADHFE1, AFF2, AFF3, AGK, AGPS, AKAP3, ANK1, ANK2, ANK3, ANKRD33B, ANXA11, ANXA6, AP4B1-AS1, ARHGEF16, ARID5B, ARL9, ARMCX3, ASAP1, ASIC1, ATP2A3, B3GALT2, B3GNT6, BCL2L15, BCYRN1, BIN3-IT1, BIRC3, BTG2, C10orf54, C11orf70, C11orf73, C11orf94, C12orf56, C19orf47, C3, C4orf27, C7orf31, C8orf34, CA13, CA3, CACNA2D2, CACNB1, CADM1, CAND2, CCDC79, CCER2, CCNF, CDCA7, CDKAL1, CELSR1, CEMIP, CEP170, CFH, CIITA, CLDN23, CMAHP, CNGA4, CNTD1, COL11A1, COL12A1, COL14A1, COL15A1, COL5A1, COL5A3, COL6A6, COL8A1, COLEC12, COMP, CPA4, CPQ, CRISPLD2, CRLF1, CRYL1, CUX1, CYB5B, CYB5R2, CYGB, CYPIB1, DCLK1, DCN, DDIT4L, DDX42, DDX50, DEGS1, DENND1A, DENND5A, DEPTOR, DFNB59, DGKA, DHFR, DIAPH3, DIRAS3, DIS3L, DLG5, DNAH8, DNAJC27, DOCK1, DOCK11, DYNC1I1, DZIP1L, EBF1, EFEMP1, EGR3, EIF2B3, ELN, ELP4, EMX2OS, ENPP1, ERCC8, ESM1, EVC2, F2R, FAM160A1, FAM198B, FAM20A, FAM46B, FAM65B, FAP, FARP1, FBLN2, FBN2, FBXO9, FCHO1, FER, FGFR2, FGL2, FLT1, FRAS1, FSCN2, GAL3ST4, GALC, GALNT15, GATA6, GBGT1, GCNT1, GDF6, GNAQ, GOLGB1, GPR183, GPR50, GPRC5A, GPRC5B, GRTP1, GUCA1B, GXYLT1, HAPLN1, HAPLN2, HAS3, HAVCR2, HDAC5, HECTD2-AS1, HEPH, HEY1, HLTF, HMGN3-AS1, HMOX1, HOOK3, HSD17B12, HSPA1L, HTATIP2, HTT, IGDCC4, IGF2R, IGFBP3, IL16, INA, INTU, IQCG, ITGA11, ITGA8, ITGB8, ITIH1, ITPKA, KCNS1, KCNS2, KDM6A, KDSR, KIAA1456, KIAA1462, KIAA1524, KIAA1715, KIAA1755, KIT, KLF17, KLRG1, KRT7, KRTAP1-1, KRTAP1-5, L3MBTL2, LAMB2P1, LGI2, LGR4, LHX9, LINC00472, LINC00570, LINC00578, LINC00607, LINC00678, LINC00702, LINC00886, LINC00961, LINC01011, LINC01118, LINC01204, LMOD1, LRBA, LRP4, LRRC32, LRRC39, LSAMP, LUM, LYPD1, LYRM1, MAFB, MAMDC2, MAN1A2, MAN2A1, MAPK13, MASP1, MB, MC4R, MEDAG, MEGF6, MEMO1, MIAT, MIR612, MLLT10, MMP10, MMP24, MMS19, MN1, MOXD1, MRVI1, MSH4, MTERF3, MXRA5, MYO1D, NA, NAALADL2, NAE1, NAGS, NDNF, NEURLIB, NGFR, NHLH1, NLN, NOTCH3, NOTUM, NOVA2, NOX4, NRROS, NTNG1, OCLN, OLR1, OSBPL10, OXCT2, PAIP2B, PAPD4, PBLD, PCM1, PDE1C, PDE5A, PDGFD, PDGFRB, PDS5B, PDXDC1, PEAR1, PEPD, PHACTR3, P14K2B, PIK3R1, PIM2, PITPNB, PITPNM3, PLAU, PLEK2, PLEKHA6, PLEKHH2, PLXNC1, PMS1, PODN, POLN, POLR1A, POSTN, PPM1E, PPP3CA, PRKCA, PRKDC, PRKG1, PRPH2, PRRG4, PRUNE2, PSMD6-AS2, PTGIS, PTX3, RAB30, RAB38, RAB44, RAD9B, RARS, RBBP8, RBKS, RCC1, RDX, RFWD2, RFX3-AS1, RGCC, RNFT1, ROR1, ROR2, RWDD4, SCARNA9, SCO1, SEC22A, SHROOM3, SIGLEC10, SLC24A3, SLC35F3, SLC39A10, SLC46A2, SLC4A11, SLC6A15, SLC7A11, SLC9A3, SLIT3, SMG1P3, SMTN, SMYD3, SNED1, SORBS2, SORCS2, SOX7, SPDYA, SPEF2, SQRDL, STAC2, STAT1, STAT4, STEAP2, STK32B, STRN4, STS, STXBP6, SULF1, SVEP1, SYNGR2, SYNPO, SYNPO2, SYNPO2L, TAGLN3, TANGO6, TARBP1, TEX21P, TGFA, TGFB2, TGFB3, TGM2, THADA, THBS2, THRB, TMEM102, TMEM119, TMEM256-PLSCR3, TMEM50B, TNC, TNFAIP8L3, TNFRSF14, TNRC18P1, TNS3, TNXB, TP53AIP1, TPRG1, TRAF3, TRIM66, TRPC4, TSHZ2, TSPAN11, TSPAN18, TSPAN7, TSSK3, TXNIP, UNC5B, USP27X, UVRAG, VIM-AS1, VPS41, VSTM2L, VWA8, VWF, WDR91, WISP1, WNT10B, XRN2, YDJC, ZBTB26, ZCCHC5, ZFP82, ZMIZ1-AS1, ZNF212, ZNF350, ZNF660, ZNF79 or ZNF837.

[0160] In another specific embodiment of the aspects and embodiments described herein, the gene is, or the RNA transcript is transcribed from a gene that is selected from: ABCA10, ACTA2, ADAL, ADAMTS1, ADAMTS5, ADD1, ADGRG6, ADH6, ADHFE1, AFF3, AKAP3, ANK1, ANK3, ANKRD33B, AP4B1-AS1, ARHGEF16, ARID5B, ARL9, ASIC1, ATP2A3, B3GALT2, B3GNT6, BCL2L15, BCYRN1, BIN3-IT1, BIRC3, BTG2, C10orf54, C11orf70, C11orf94, C12orf56, C19orf47, C3, C7orf31, C8orf34, CA13, CA3, CACNA2D2, CACNB1, CADM1, CAND2, CCDC79, CCER2, CCNF, CELSR1, CEMIP, CEP170, CFH, CIITA, CLDN23, CMAHP, CNGA4, CNTD1, COL11A1, COL14A1, COL15A1, COL5A1, COL5A3, COL6A6, COL8A1, COLEC12, COMP, CPA4, CPQ, CRISPLD2, CRLF1, CRYL1, CYB5R2, CYGB, CYP1B1, DCLK1, DCN, DDIT4L, DDX50, DEGS1, DEPTOR, DFNB59, DIRAS3, DLG5, DNAH8, DNAJC27, DOCK11, DYNC1I1, DZIP1L, EFEMP1, EGR3, ELN, ELP4, EMX2OS, ENPP1, ERCC8, ESM1, EVC2, F2R, FAM160A1, FAM20A, FAM46B, FAM65B, FAP, FARP1, FBLN2, FBN2, FBXO9, FCHO1, FGFR2, FGL2, FLT1, FRAS1, FSCN2, GAL3ST4, GALNT15, GATA6, GBGT1, GCNT1, GDF6, GNAQ, GPR183, GPR50, GPRC5A, GPRC5B, GRTP1, GUCA1B, GXYLT1, HAPLN1, HAPLN2, HA S3, HAVCR2, HDAC5, HECTD2-AS1, HEPH, HEY1, HMGN3-AS1, HOOK3, HSPA1L, HTATIP2, IGDCC4, IGF2R, IGFBP3, 1L16, INA, INTU, IQCG, ITGA11, ITGA8, ITGB8, ITIH1, ITPKA, KCNS1, KCNS2, KDM6A, KDSR, KIAA1456, KIAA1462, KIAA1755, KIT, KLF17, KLRG1, KRT7, KRTAP1-1, KRTAP1-5, L3MBTL2, LAMB2P1, LGI2, LGR4, LHX9, LINC00472, LINC00570, LINC00578, LINC00607, LINC00678, LINC00702, LINC00886, LINC00961, LINC01011, LINC01118, LINC01204, LMOD1, LRBA, LRP4, LRRC32, LRRC39, LSAMP, LUM, LYPD1, MAFB, MAMDC2, MAN2A1, MAPK13, MASP1, MB, MC4R, MEGF6, MIAT, MIR612, MLLT10, MMP10, MMP24, MN1, MOXD1, MRVI1, MSH4, MTERF3, MXRA5, NA, NAALADL2, NAE1, NAGS, NDNF, NGFR, NHLH1, NLN, NOTCH3, NOTUM, NOVA2, NOX4, NRROS, OCLN, OLR1, OSBPL10, OXCT2, PAIP2B, PBLD, PDE1C, PDE5A, PDGFD, PDGFRB, PDS5B, PEAR1, PHACTR3, PI4K2B, PIK3R1, PIM2, PITPNM3, PLEK2, PLEKHA6, PLEKHH2, PODN, POLN, POLR1A, PPM1E, PPP3CA, PRKCA, PRKG1, PRPH2, PRRG4, PRUNE2, PSMD6-AS2, PTGIS, PTX3, RAB30, RAB38, RAB44, RAD9B, RARS, RBBP8, RBKS, RDX, RFX3-AS1, RGCC, ROR1, ROR2, SCARNA9, SHROOM3, SIGLEC10, SLC24A3, SLC35F3, SLC39A10, SLC46A2, SLC4A11, SLC6A15, SLC7A11, SLC9A3, SLIT3, SMG1P3, SMTN, SNED1, SORBS2, SORCS2, SOX7, SPDYA, SPEF2, STAC2, STAT4, STK32B, STRN4, STS, STXBP6, SULF1, SVEP1, SYNGR2, SYNPO, SYNPO2, SYNPO2L, TAGLN3, TANGO6, TEX21P, TGFA, TGFB2, TGFB3, TGM2, THBS2, TMEM102, TMEM119, TMEM256-PLSCR3, TMEM50B, TNFAIP8L3, TNFRSF14, TNRC18P1, TNXB, TP53AIP1, TPRG1, TRIM66, TRPC4, TSHZ2, TSPAN11, TSPAN18, TSPAN7, TSSK3, TXNIP, USP27X, UVRAG, VIM-AS1, VPS41, VSTM2L, VWF, WDR91, WISP1, WNT10B, YDJC, ZBTB26, ZCCHC5, ZFP82, ZMIZ1-AS1, ZNF212, ZNF350, ZNF660, ZNF79 or ZNF837.

[0161] In another specific embodiment of the aspects and embodiments described herein, the gene is, or the RNA transcript is transcribed from a gene that is selected from: ABCB8, ABCC3, ADAM17, ADCY3, AGPAT4, ANKRA2, ANXA11, APIP, APLP2, APLP2, ARHGAP1, ARL15, ASAP1, ASPH, ATAD2B, ATXN1, AXIN1, BECN1, BHMT2, BICD1, BTN3A1, C11orf30, C11orf73, C12orf4, C14orf132, C8orf44, C8orf44-SGK3, C8orf88, CASC3, CASP7, CCDC122, CDH13, CECR7, CENPI, CEP112, CEP192, CHEK1, CMAHP, CNRIP1, COPS7B, CPSF4, CRISPLD2, CRYBG3, CSNK1E, CSNK1G1, DAGLB, DCAF17, DCUN1D4, DDX42, DENND1A, DENND5A, DGKA, DHFR, DIAPH3, DLGAP4, DNAJC13, DNMBP, DOCK1, DYRK1A, EIF2B3, ENAH, ENOX1, EP300, ERC1, ERCC1, ERGIC3, ERLIN2, ERRFI1, EVC, FAF1, FAIM, FAM126A, FAM13A, FAM162A, FAM174A, FAM198B, FBN2, FER, FHOD3, FOCAD, GALC, GCFC2, GGACT, GGCT, GLCE, GOLGA4, GOLGB1, GPSM2, GULP1, GXYLT1, HAT1, HDX, HLTF, HMGA2, HNMT, HPS1, HSD17B12, HSD17B4, HTT, IFT57, INPP5K, IVD, KDM6A, KIAA1524, KIAA1715, LETM2, LOC400927, LRRC42, LUC7L3, LYRM1, MADD, MB21D2, MCM10, MED13L, MEDAG, MEMO1, MFN2, MMS19, MRPL45, MRPS28, MTERF3, MYCBP2, MYLK, MYOF, NGF, NREP, NSUN4, NT5C2, OSMR, OXCT1, PAPD4, PCM1, PDE7A, PDS5B, PDXDC1, PIGN, PIK3CD, PIK3R1, PIKFYVE, PITPNB, PLEKHA1, PLSCR1, PMS1, POMT2, PPARG, PPHLN1, PPIP5K2, PPP1R26, PRPF31, PRSS23, PRUNE2, PSMA4, PXK, RAF1, RAPlA, RAPGEF1, RARS2, RBKS, RERE, RFWD2, RNFT1, RPA1, RPS10, RPS6KB2, SAMD4A, SAR1A, SCO1, SEC24A, SENP6, SERGEF, SGK3, SH3YL1, SKA2, SLC12A2, SLC25A17, SLC44A2, SMYD3, SNAP23, SNHG16, SNX7, SOS2, SPATA18, SPATA5, SPIDR, SPRYD7, SRGAP1, SRRM1, STAT1, STRN3, STXBP6, SUPT20H, TAF2, TASP1, TBC1D15, TCF12, TCF4, TIAM1, TJP2, TMC3, TMEM189-UBE2V1, TMEM214, TNRC6A, TNS3, TOE1, TRAF3, TRIM65, TSPAN2, TTC7B, TUBE1, TYW5, UBAP2L, UBE2V1, URGCP, VAV2, VPS29, WDR27, WDR37, WDR91, WNK1, XRN2, ZCCHC8, ZFP82, ZNF138, ZNF232, ZNF37BP or ZNF680.

[0162] In another specific embodiment of the aspects and embodiments described herein, the gene is, or the RNA transcript is transcribed from a gene that is selected from: ABCB8, ABCC3, ADAM17, ADCY3, AGPAT4, ANKRA2, ANXA11, APIP, APPL2, ARHGAP1, ARL15, ASAP1, ASPH, ATAD2B, ATXN1, BECN1, BHMT2, BICD1, BTN3A1, C11orf30, C11orf73, C12orf4, C14orf132, C8orf44, C8orf44-SGK3, C8orf88, CASC3, CASP7, CCDC122, CDH13, CECR7, CENPI, CEP112, CEP192, CHEK1, CMAHP, CNRIP1, COPS7B, CPSF4, CRISPLD2, CRYBG3, CSNK1E, CSNK1G1, DCAF17, DCUN1D4, DDX42, DENND1A, DENND5A, DGKA, DHFR, DIAPH3, DNAJC13, DNMBP, DOCK1, DYRK1A, EIF2B3, ENAH, ENOX1, EP300, ERC1, ERLIN2, ERRFI1, EVC, FAF1, FAIM, FAM126A, FAM13A, FAM162A, FAM174A, FBN2, FER, FHOD3, FOCAD, GALC, GCFC2, GGACT, GLCE, GOLGA4, GOLGB1, GPSM2, GULP1, GXYLT1, HDX, HLTF, HMGA2, HNMT, HSD17B12, HSD17B4, HTT, IFT57, IVD, KDM6A, K1AA1524, K1AA1715, LETM2, LOC400927, LRRC42, LUC7L3, LYRM1, MB21D2, MCM10, MED13L, MEDAG, MEMO1, MFN2, MMS19, MRPL45, MRPS28, MTERF3, MYCBP2, MYLK, MYOF, NGF, NREP, NSUN4, NT5C2, OSMR, OXCT1, PAPD4, PCM1, PDE7A, PDS5B, PDXDC1, PIGN, PIK3CD, PIK3R1, PIKFYVE, PITPNB, PLEKHA1, PLSCR1, PMS1, POMT2, PPARG, PPIP5K2, PPP1R26, PRPF31, PRSS23, PSMA4, PXK, RAF1, RAPGEF1, RARS2, RBKS, RERE, RFWD2, RPA1, RPS10, SAMD4A, SAR1A, SCO1, SEC24A, SENP6, SERGEF, SGK3, SLC12A2, SLC25A17, SLC44A2, SMYD3, SNAP23, SNHG16, SNX7, SOS2, SPATA5, SPIDR, SPRYD7, SRGAP1, SRRM1, STAT1, STXBP6, SUPT20H, TAF2, TASP1, TBC1D15, TCF12, TCF4, TIAM1, TJP2, TMC3, TMEM214, TNRC6A, TNS3, TOE1, TRAF3, TSPAN2, TTC7B, TYW5, UBAP2L, URGCP, VAV2, WDR27, WDR37, WDR91, WNK1, XRN2, ZCCHC8, ZFP82, ZNF138, ZNF232 or ZNF37BP.

[0163] In another specific embodiment of the aspects and embodiments described herein, the gene is, or the RNA transcript is transcribed from a gene that is selected from: APLP2, AXIN1, CECR7, DAGLB, DLGAP4, ERCC1, ERGIC3, FAM198B, GGCT, HAT1, HPS1, INPP5K, MADD, PPHLN1, PRUNE2, RAPlA, RNFT1, RPS6KB2, SH3YL1, SKA2, SPATA18, STRN3, TMEM189-UBE2V1, TRIM65, TUBE1, UBE2V1, VPS29 or ZNF680.

[0164] In another specific embodiment of the aspects and embodiments described herein, the gene is, or the RNA transcript is transcribed from a gene that is selected from: ABCB8, ABCC3, ADCY3, AGPAT4, ANKRA2, APIP, ARHGAP1, ARL15, ATXN1, BECN1, BHMT2, BTN3A1, C12orf4, C14orf132, C8orf44, C8orf44-SGK3, C8orf88, CASP7, CCDC122, CECR7, CENPI, CEP112, CEP192, CHEK1, CMAHP, CNRIP1, CPSF4, CRISPLD2, CRYBG3, CSNK1E, CSNK1G1, DAGLB, DCAF17, DLGAP4, DNAJC13, DNMBP, DYRK1A, ENAH, EP300, ERCC1, ERLIN2, ERRFI1, EVC, FAIM, FAM126A, FAM13A, FAM162A, FAM174A, FBN2, GGACT, GLCE, GULP1, GXYLT1, HDX, HMGA2, HNMT, HPS1, IFT57, INPP5K, IVD, KDM6A, LETM2, LOC400927, LRRC42, LYRM1, MB21D2, MCM10, MED13L, MFN2, MRPL45, MRPS28, MTERF3, MYCBP2, NGF, OXCT1, PDS5B, PIGN, PIK3CD, PIK3R1, PIKFYVE, PLEKHA1, PLSCR1, POMT2, PPARG, PPIP5K2, PPP1R26, PRPF31, PRUNE2, PXK, RAF1, RAPGEF1, RARS2, RBKS, RERE, RPA1, RPS10, RPS6KB2, SAMD4A, SEC24A, SENP6, SERGEF, SGK3, SH3YL1, SKA2, SLC12A2, SLC44A2, SNX7, SPATA18, SPATA5, SPIDR, SPRYD7, SRGAP1, SRRM1, STXBP6, TASP1, TCF12, TCF4, TIAM1, TMC3, TMEM189-UBE2V1, TMEM214, TNRC6A, TTC7B, TUBE1, TYW5, URGCP, VAV2, WDR27, WDR91, WNK1, ZCCHC8, ZFP82, ZNF138, ZNF232 or ZNF680.

[0165] In another aspect, provide herein is a method of modulating the amount and type of a protein produced by a cell containing the artificial gene construct as described above, the method comprising contacting the cell with a compound of Formula (I) or a form thereof, wherein Formula (I) is

[chemical structure]

[0166] wherein:
[0167] w₁ and w₅ are independently C—Rₐ or N;
[0168] w₂ is C—R_{b} or N;
[0169] w₃, w₄ and w₇ are independently C—R₁, C—R₂, C—Rₐ or N;
[0170] w₆ is C—R₁, C—R₂, C—R_{c} or N;
[0171] wherein one of w₃, w₄, w₆ and w₇ is C—R₁ and one other of w₃, w₄, w₆ and w₇ is C—R₂, provided that,
[0172] when w₃ is C—R₁, then w₆ is C—R₂ and w₄ and w₇ are independently C—Rₐ or N; or,
[0173] when w₃ is C—R₂, then w₆ is C—R₁ and w₄ and w₇ are independently C—Rₐ or N; or,
[0174] when w₄ is C—R₁, then w₇ is C—R₂ and w₃ is C—Rₐ or N and w₆ is C—R_{c} or N; or,
[0175] when w₄ is C—R₂, then w₇ is C—R₁ and w₃ is C—Rₐ or N and w₆ is C—R_{c} or N; and,
[0176] wherein any one, two or three of w₁, w₂, w₃, w₄, w₅, w₆ and w₇ may optionally be N;
[0177] R₁ is C₁₋₈alkyl, amino, C₁₋₈alkyl-amino, (C₁₋₈alkyl)₂-amino, C₁₋₈alkoxy-C₁₋₈alkyl-amino, (C₁₋₈alkoxy-C₁₋₈alkyl)₂-amino, (C₁₋₈alkoxy-C₁₋₈alkyl)(C₁₋₈alkyl)amino, amino-C₁₋₈alkyl, C₁₋₈alkyl-amino-C₁₋₈alkyl, (C₁₋₈alkyl)₂-amino-C₁₋₈alkyl, C₁₋₈alkoxy-C₁₋₈alkyl-amino-C₁₋₈alkyl, (C₁₋₈alkoxy-C₁₋₈alkyl)₂-amino-C₁₋₈alkyl, (C₁₋₈alkoxy-C₁₋₈alkyl)(C₁₋₈alkyl)amino-C₁₋₈alkyl, amino-C₁₋₈alkyl-amino, (amino-C₁₋₈alkyl)₂-amino, (amino-C₁₋₈alkyl)(C₁₋₈alkyl)amino, C₁₋₈alkyl-amino-C₁₋₈alkyl-amino, (C₁₋₈alkyl-amino-C₁₋₈alkyl)₂-amino, (C₁₋₈alkyl-amino-C₁₋₈alkyl)(C₁₋₈alkyl)amino, (C₁₋₈alkyl)₂-amino-C₁₋₈alkyl-amino, [(C₁₋₈alkyl)₂-amino-C₁₋₈alkyl](C₁₋₈alkyl)amino, amino-C₁₋₈alkoxy, C₁₋₈alkyl-amino-C₁₋₈alkoxy, (C₁₋₈alkyl)₂-amino-C₁₋₈alkoxy, C₁₋₈alkoxy-C₁₋₈alkyl-amino-C₁₋₈alkoxy, C₁₋₈alkoxy-C₁₋₈alkyl-amino-C₁₋₈alkoxy, (C₁₋₈alkoxy-C₁₋₈alkyl)(C₁₋₈alkyl)amino-C₁₋₈alkoxy, amino-C₂₋₈alkenyl, C₁₋₈alkyl-amino-C₂₋₈alkenyl, (C₁₋₈alkyl)₂-amino-C₂₋₈alkenyl, amino-C₂₋₈alkynyl, C₁₋₈alkyl-amino-C₂₋₈alkynyl, (C₁₋₈alkyl)₂-amino-C₂₋₈alkynyl, halo-C₁₋₈alkyl-amino, (halo-C₁₋₈alkyl)₂-amino, (halo-C₁₋₈alkyl)(C₁₋₈alkyl)amino, hydroxy-C₁₋₈alkyl, hydroxy-C₁₋₈alkoxy-C₁₋₈alkyl, hydroxy-C₁₋₈alkyl-amino, (hydroxy-C₁₋₈alkyl)₂-amino, (hydroxy-C₁₋₈alkyl)(C₁₋₈alkyl)amino, hydroxy-C₁₋₈alkyl-amino-C₁₋₈alkyl, (hydroxy-C₁₋₈alkyl)₂-amino-C₁₋₈alkyl, (hydroxy-C₁₋₈alkyl)(C₁₋₈alkyl)amino-C₁₋₈alkyl, hydroxy-C₁₋₈alkyl-amino-C₁₋₈alkoxy, (hydroxy-C₁₋₈alkyl)₂-amino-C₁₋₈alkoxy, (hydroxy-C₁₋₈alkyl)(C₁₋₈alkyl)amino-C₁₋₈alkoxy, hydroxy-C₁₋₈alkyl-amino-C₁₋₈alkyl-amino, (hydroxy-C₁₋₈alkyl-amino-C₁₋₈alkyl)₂-amino, (hydroxy-C₁₋₈alkyl)₂-amino-C₁₋₈alkyl-amino, (hydroxy-C₁₋₈alkyl-amino-C₁₋₈alkyl)(C₁₋₈alkyl)amino, (hydroxy-C₁₋₈alkyl)(C₁₋₈alkyl)amino-C₁₋₈alkyl-amino, [(hydroxy-C₁₋₈alkyl)₂-amino-C₁₋₈alkyl](C₁₋₈alkyl)amino, [(hydroxy-C₁₋₈alkyl)(C₁₋₈alkyl)amino-C₁₋₈alkyl](C₁₋₈alkyl)amino, heterocyclyl, heterocyclyl-C₁₋₈alkyl, heterocyclyl-C₁₋₈alkoxy, heterocyclyl-amino, (heterocyclyl)(C₁₋₈alkyl)amino, heterocyclyl-amino-C₁₋₈alkyl, heterocyclyl-C₁₋₈alkyl-amino, (heterocyclyl-C₁₋₈alkyl)₂-amino, (heterocyclyl-C₁₋₈alkyl)(C₁₋₈alkyl)amino, heterocyclyl-C₁₋₈alkyl-amino-C₁₋₈alkyl, (heterocyclyl-C₁₋₈alkyl)₂-amino-C₁₋₈alkyl, (heterocyclyl-C₁₋₈alkyl)(C₁₋₈alkyl)amino-C₁₋₈alkyl, heterocyclyl-oxy, heterocyclyl-carbonyl, heterocyclyl-carbonyl-oxy, C₃₋₁₄cycloalkyl, aryl-C₁₋₈alkyl-amino, (aryl-C₁₋₈alkyl)₂-amino, (aryl-C₁₋₈alkyl)(C₁₋₈alkyl)amino, aryl-C₁₋₈alkyl-amino-C₁₋₈alkyl, (aryl-C₁₋₈alkyl)₂-amino-C₁₋₈alkyl, (aryl-C₁₋₈alkyl)(C₁₋₈alkyl)amino-C₁₋₈alkyl, heteroaryl, heteroaryl-C₁₋₈alkyl, heteroaryl-C₁₋₈alkoxy, heteroaryl-amino, heteroaryl-C₁₋₈alkyl-amino, (heteroaryl-C₁₋₈alkyl)₂-amino, (heteroaryl-C₁₋₈alkyl)(C₁₋₈alkyl)amino, heteroaryl-C₁₋₈alkyl-amino-C₁₋₈alkyl, (heteroaryl-C₁₋₈alkyl)₂-amino-C₁₋₈alkyl or (heteroaryl-C₁₋₈alkyl)(C₁₋₈alkyl)amino-C₁₋₈alkyl;
[0178] wherein, each instance of heterocyclyl, C₃₋₁₄cycloalkyl, aryl and heteroaryl is optionally substituted with one, two or three R₃ substituents and optionally, with one additional R₄ substituent; or,
[0179] wherein, each instance of heterocyclyl, C₃₋₁₄cycloalkyl, aryl and heteroaryl is optionally substituted with one, two, three or four R₃ substituents;
[0180] R₂ is aryl, aryl-amino, aryl-amino-carbonyl, heterocyclyl, heteroaryl or heteroaryl-amino;
[0181] wherein, each instance of aryl, heterocyclyl and heteroaryl is optionally substituted with one, two or three R₆ substituents and optionally, with one additional R₇ substituent;
[0182] Rₐ is, in each instance, independently selected from hydrogen, halogen, C₁₋₈alkyl or deuterium;
[0183] R_{b} is hydrogen, halogen, C₁₋₈alkyl, C₁₋₈alkoxy or deuterium;
[0184] R_{c} is hydrogen, halogen, C₁₋₈alkyl or deuterium;
[0185] R₃ is, in each instance, independently selected from cyano, halogen, hydroxy, oxo, C₁₋₈alkyl, halo-C₁₋₈alkyl, C₁₋₈alkyl-carbonyl, C₁₋₈alkoxy, halo-C₁₋₈alkoxy,
[0186] C₁₋₈alkoxy-C₁₋₈alkyl, C₁₋₈alkoxy-carbonyl, amino, C₁₋₈alkyl-amino, (C₁₋₈alkyl)₂-amino, amino-C₁₋₈alkyl, C₁₋₈alkyl-amino-C₁₋₈alkyl, (C₁₋₈alkyl)₂-amino-C₁₋₈alkyl, amino-C₁₋₈alkyl-amino, C₁₋₈alkyl-amino-C₁₋₈alkyl-amino, (C₁₋₈alkyl-amino-C₁₋₈alkyl)₂-amino, (C₁₋₈alkyl)₂-amino-C₁₋₈alkyl-amino, [(C₁₋₈alkyl)₂-amino-C₁₋₈alkyl]₂-amino, (C₁₋₈alkyl-amino-C₁₋₈alkyl)C₁₋₈alkyl)amino, [(C₁₋₈alkyl)₂-amino-C₁₋₈alkyl](C₁₋₈alkyl)amino, C₁₋₈alkoxy-C₁₋₈alkyl-amino, (C₁₋₈alkoxy-C₁₋₈alkyl)₂-amino, (C₁₋₈alkoxy-C₁₋₈alkyl)(C₁₋₈alkyl)amino, C₁₋₈alkyl-carbonyl-amino, C₁₋₈alkoxy-carbonyl-amino, hydroxy-C₁₋₈alkyl, hydroxy-C₁₋₈alkoxy-C₁₋₈alkyl, hydroxy-C₁₋₈alkyl-amino, (hydroxy-C₁₋₈alkyl)₂-amino or (hydroxy-C₁₋₈alkyl)(C₁₋₈alkyl)amino;
[0187] R₄ is C₃₋₁₄cycloalkyl, C₃₋₁₄cycloalkyl-C₁₋₈alkyl, C₃₋₁₄cycloalkyl-amino, aryl-C₁₋₈alkyl, aryl-C₁₋₈alkoxy-carbonyl, aryl-sulfonyloxy-C₁₋₈alkyl, heterocyclyl or heterocyclyl-C₁₋₈alkyl; wherein, each instance of C₃₋₁₄cycloalkyl, aryl and heterocyclyl is optionally substituted with one, two or three R₅ substituents;
[0188] R₅ is, in each instance, independently selected from halogen, hydroxy, cyano, nitro, C₁₋₈alkyl, halo-C₁₋₈alkyl, C₁₋₈alkoxy, halo-C₁₋₈alkoxy, amino, C₁₋₈alkyl-amino, (C₁₋₈alkyl)₂-amino or C₁₋₈alkyl-thio;
[0189] R₆ is, in each instance, independently selected from halogen, hydroxy, cyano, nitro, C₁₋₈alkyl, C₂₋₈alkenyl, halo-C₁₋₈alkyl, hydroxy-C₁₋₈alkyl, C₁₋₈alkoxy, halo-C₁₋₈alkoxy, C₁₋₈alkoxy-C₁₋₈alkyl, amino, C₁₋₈alkyl-amino, (C₁₋₈alkyl)₂-amino or C₁₋₈alkyl-thio; and,
[0190] R₇ is C₃₋₁₄cycloalkyl, C₃₋₁₄cycloalkyl-oxy, aryl, heterocyclyl or heteroaryl.

[0191] In a specific embodiment, in the context of DNA, the nucleotide sequence encoding the intronic REMS comprises a sequence selected from the group consisting of ANGAgtrngn (SEQ ID NO: 1829), CNGAgtrngn (SEQ ID NO: 1835), GNGAgtrngn (SEQ ID NO: 1841), TNGAgtrngn (SEQ ID NO: 1847), NAGAgtrngn (SEQ ID NO: 1830), NCGAgtrngn (SEQ ID NO: 1836), NGGAgtrngn (SEQ ID NO: 1842), NTGAgtrngn (SEQ ID NO: 1848), AAGAgtrngn (SEQ ID NO: 1831), ACGAgtrngn (SEQ ID NO: 1837), AGGAgtrngn (SEQ ID NO: 1843), ATGAgtrngn (SEQ ID NO: 1849), CAGAgtrngn (SEQ ID NO: 1832), CCGAgtrngn (SEQ ID NO: 1838), CGGAgtrngn (SEQ ID NO: 1844), CTGAgtrngn (SEQ ID NO: 1850), GAGAgtrngn (SEQ ID NO: 1833), GCGAgtrngn (SEQ ID NO: 1839), GGGAgtrngn (SEQ ID NO: 1845), GTGAgtrngn (SEQ ID NO: 1851), TAGAgtrngn (SEQ ID NO: 1834), TCGAgtrngn (SEQ ID NO: 1840), TGGAgtrngn (SEQ ID NO: 1846) and TTGAgtrngn (SEQ ID NO: 1852), wherein r is adenine or guanine and n or N is any nucleotide.

[0192] In a further specific embodiment, in the context of DNA, the nucleotide sequence encoding the intronic REMS comprises a sequence selected from the group consisting of ANGAgtragt (SEQ ID NO: 2237), CNGAgtragt (SEQ ID NO: 2243), GNGAgtragt (SEQ ID NO: 2249), TNGAgtragt (SEQ ID NO: 2255), NAGAgtragt (SEQ ID NO: 2238), NCGAgtragt (SEQ ID NO: 2244), NGGAgtragt (SEQ ID NO: 2250), NTGAgtragt (SEQ ID NO: 2256), AAGAgtragt (SEQ ID NO: 2239), ACGAgtragt (SEQ ID NO: 2245), AGGAgtragt (SEQ ID NO: 2251), ATGAgtragt (SEQ ID NO: 2257), CAGAgtragt (SEQ ID NO: 2240), CCGAgtragt (SEQ ID NO: 2246), CGGAgtragt (SEQ ID NO: 2252), CTGAgtragt (SEQ ID NO: 2258), GAGAgtragt (SEQ ID NO: 2241), GCGAgtragt (SEQ ID NO: 2247), GGGAgtragt (SEQ ID NO: 2253), GTGAgtragt (SEQ ID NO: 2259), TAGAgtragt (SEQ ID NO: 2242), TCGAgtragt (SEQ ID NO: 2248), TGGAgtragt (SEQ ID NO: 2254) and TTGAgtragt (SEQ ID NO: 2260), wherein r is adenine or guanine and N is any nucleotide. In one or more embodiments provided herein, N is adenine or guanine.

[0193] In various specific embodiments, the nucleotide sequence encoding the intronic REMS is a nucleotide sequence encoding a non-endogenous intronic REMS, i.e., a precursor RNA transcript comprising the non-endogenous intronic REMS not naturally found in the DNA sequence of the artificial construct.

[0194] In one aspect, provided herein is a method for modulating the amount of an RNA transcript comprising a RNA nucleotide sequence comprising in 5′ to 3′ order: a branch point, a 3′ splice site and an endogenous intronic recognition element for splicing modifier (iREMS), wherein the iREMS comprises an RNA sequence GAgurngn (SEQ ID NO: 2), wherein r is adenine or guanine and n is any nucleotide, and wherein the RNA transcript is an RNA transcript of a gene that is selected from: ABCA10, ABCB8, ABCC3, ACTA2, ADAL, ADAMTS1, ADCY3, ADD1, ADGRG6, ADH6, ADHFE1, AFF3, AGPAT4, AKAP3, ANK1, ANK3, ANKRA2, ANKRD33B, ANKRD36, AP4B1-AS1, APIP, ARHGAP1, ARHGAP12, ARHGEF16, ARID5B, ARL15, ARL9, ARMCX6, ASIC1, ATG5, ATP2A3, ATXN1, B3GALT2, B3GNT6, BCL2L15, BCYRN1, BECN1, BHMT2, BIN3-IT1, BIRC3, BIRC6, BTG2, BTN3A1, C10orf54, C11orf70, C11orf94, C12orf4, C12orf56, C14orf132, C19orf47, C1orf86, C3, C7orf31, C8orf34, C8orf44, C8orf44-SGK3, C8orf88, CA13, CA3, CACNA2D2, CACNB1, CADM1, CAND2, CASP7, CCDC122, CCDC79, CCER2, CCNF, CECR7, CELSR1, CEMIP, CENPI, CEP112, CEP170, CEP192, CFH, CHEK1, CIITA, CLDN23, CLTA, CMAHP, CNGA4, CNRIP1, CNTD1, COL11A1, COL14A1, COL15A1, COL5A1, COL5A3, COL6A6, COL8A1, COLEC12, COMP, CPA4, CPQ, CPSF4, CRISPLD2, CRLF1, CRYBG3, CRYL1, CSNK1E, CSNK1G1, CYB5R2, CYGB, CYP1B1, DAGLB, DCAF17, DCLK1, DCN, DDIT4L, DDX50, DEGS1, DEPTOR, DFNB59, DIRAS3, DLG5, DLGAP4, DNAH8, DNAJC13, DNAJC27, DNMBP, DOCK11, DYNC1I1, DYRK1A, DZIP1L, EFEMP1, EGR3, ELN, ELP4, EMX2OS, ENAH, ENPP1, EP300, ERCC1, ERCC8, ERGIC3, ERLIN2, ERRFI1, ESM1, EVC, EVC2, F2R, FAIM, FAM126A, FAM13A, FAM160A1, FAM162A, FAM174A, FAM20A, FAM46B, FAM65B, FAP, FARP1, FBLN2, FBN2, FBXL6, FCHO1, FGFR2, FGL2, FLT1, FRAS1, FSCN2, GAL3ST4, GALNT15, GATA6, GBGT1, GCNT1, GDF6, GGACT, GLCE, GNAQ, GPR183, GPR50, GPRC5A, GPRC5B, GRTP1, GUCA1B, GULP1, GXYLT1, HAPLN1, HAPLN2, HAS3, HAVCR2, HDAC5, HDX, HECTD2-AS1, HEPH, HEY1, HMGA2, HMGN3-AS1, HNMT, HOOK3, HPS1, HSPA1L, HTATIP2, IFT57, IGDCC4, IGF2R, IGFBP3, IL16, INA, INPP5K, INTU, IQCG, ITGA11, ITGA8, ITGB8, ITIH1, ITPKA, IVD, KAT6B, KCNS1, KCNS2, KDM6A, KDSR, KIAA1456, KIAA1462, KIAA1755, KIT, KLF17, KLRG1, KMT2D, KRT7, KRTAP1-1, KRTAP1-5, L3MBTL2, LAMB2P1, LETM2, LGI2, LGR4, LHX9, LINC00472, LINC00570, LINC00578, LINC00607, LINC00678, LINC00702, LINC00886, LINC00961, LINC01011, LINC01118, LINC01204, LMOD1, LOC400927, LRBA, LRP4, LRRC32, LRRC39, LRRC42, LSAMP, LUM, LYPD1, LYRM1, MAFB, MAMDC2, MAN2A1, MAN2C1, MAPK13, MASP1, MB, MB21D2, MC4R, MCM10, MED13L, MEGF6, MFN2, MIAT, MIR612, MLLT10, MMP10, MMP24, MN1, MOXD1, MRPL45, MRPL55, MRPS28, MRVI1, MSH4, MTERF3, MXRA5, MYCBP2, NA, NAALADL2, NAE1, NAGS, NDNF, NGF, NGFR, NHLH1, NLN, NOTCH3, NOTUM, NOVA2, NOX4, NRROS, OCLN, OLR1, OSBPL10, OXCT1, OXCT2, PAIP2B, PBLD, PDE1C, PDE5A, PDGFD, PDGFRB, PDS5B, PEAR1, PHACTR3, PIGN, PIK3CD, PIK3R1, PIKFYVE, PIM2, PITPNM3, PLEK2, PLEKHA1, PLEKHA6, PLEKHH2, PLSCR1, PNISR, PODN, POLN, POLR1A, POMT2, PPARG, PPIP5K2, PPM1E, PPP1R26, PPP3CA, PRKCA, PRKG1, PRPF31, PRPH2, PRRG4, PRUNE2, PSMD6-AS2, PTGIS, PTX3, PXK, RAB30, RAB38, RAB44, RAD9B, RAF1, RAPGEF1, RARS, RARS2, RBBP8, RBKS, RDX, RERE, RFX3-AS1, RGCC, ROR1, ROR2, RPA1, RPS10, RPS6KB2, SAMD4A, SCARNA9, SEC24A, SENP6, SERGEF, SGK3, SH3YL1, SHROOM3, SIGLEC10, SKA2, SLC12A2, SLC24A3, SLC35F3, SLC39A10, SLC44A2, SLC46A2, SLC4A11, SLC6A15, SLC7A11, SLC9A3, SLIT3, SMG1P3, SMTN, SNED1, SNX7, SORBS2, SORCS2, SOX7, SPATA18, SPATA5, SPDYA, SPEF2, SPIDR, SPRYD7, SRGAP1, SRRM1, STAC2, STAT4, STK32B, STRN4, STS, STXBP6, SULF1, SVEP1, SYNGR2, SYNPO, SYNPO2, SYNPO2L, TAGLN3, TANGO6, TASP1, TCF12, TCF4, TGFA, TGFB2, TGFB3, TGM2, THBS2, TIAM1, TMC3, TMEM102, TMEM119, TMEM134, TMEM189-UBE2V1, TMEM214, TMEM256-PLSCR3, TMEM50B, TNFAIP8L3, TNFRSF14, TNRC18P1, TNRC6A, TNXB, TP53AIP1, TPRG1, TRIM66, TRPC4, TSHZ2, TSPAN11, TSPAN18, TSPAN7, TSSK3, TTC7B, TUBE1, TXNIP, TYW5, URGCP, USP27X, UVRAG, VAV2, VIM-AS1, VPS41, VSTM2L, VWF, WDR27, WDR91, WISP1, WNK1, WNT10B, YDJC, ZBTB26, ZCCHC5, ZCCHC8, ZFP82, ZMIZ1-AS1, ZNF138, ZNF212, ZNF232, ZNF350, ZNF431, ZNF660, ZNF680, ZNF79, or ZNF837; the method comprising contacting the RNA transcript with a compound of Formula (I) or a form thereof, wherein Formula (I) is:

[chemical structure]

[0195] wherein:
[0196] w₁ and w₅ are independently C—Rₐ or N;
[0197] w₂ is C—R_{b} or N;
[0198] w₃, w₄ and w₇ are independently C—R₁, C—R₂, C—Rₐ or N;
[0199] w₆ is C—R₁, C—R₂, C—R_{c} or N;
[0200] wherein one of w₃, w₄, w₆ and w₇ is C—R₁ and one other of w₃, w₄, w₆ and w₇ is C—R₂, provided that,
[0201] when w₃ is C—R₁, then w₆ is C—R₂ and w₄ and w₇ are independently C—Rₐ or N; or,
[0202] when w₃ is C—R₂, then w₆ is C—R₁ and w₄ and w₇ are independently C—Rₐ or N; or,
[0203] when w₄ is C—R₁, then w₇ is C—R₂ and w₃ is C—Rₐ or N and w₆ is C—R_{c} or N; or,
[0204] when w₄ is C—R₂, then w₇ is C—R₁ and w₃ is C—Rₐ or N and w₆ is C—R_{c} or N; and,
[0205] wherein any one, two or three of w₁, w₂, w₃, w₄, w₅, w₆ and w₇ may optionally be N;
[0206] R₁ is C₁₋₈alkyl, amino, C₁₋₈alkyl-amino, (C₁₋₈alkyl)₂-amino, C₁₋₈alkoxy-C₁₋₈alkyl-amino, (C₁₋₈alkoxy-C₁₋₈alkyl)₂-amino, (C₁₋₈alkoxy-C₁₋₈alkyl)(C₁₋₈alkyl)amino, amino-C₁₋₈alkyl, C₁₋₈alkyl-amino-C₁₋₈alkyl, (C₁₋₈alkyl)₂-amino-C₁₋₈alkyl, C₁₋₈alkoxy-C₁₋₈alkyl-amino-C₁₋₈alkyl, (C₁₋₈alkoxy-C₁₋₈alkyl)₂-amino-C₁₋₈alkyl, (C₁₋₈alkoxy-C₁₋₈alkyl)(C₁₋₈alkyl)amino-C₁₋₈alkyl, amino-C₁₋₈alkyl-amino, (amino-C₁₋₈alkyl)₂-amino, (amino-C₁₋₈alkyl)(C₁₋₈alkyl)amino, C₁₋₈alkyl-amino-C₁₋₈alkyl-amino, (C₁₋₈alkyl-amino-C₁₋₈alkyl)₂-amino, (C₁₋₈alkyl-amino-C₁₋₈alkyl)(C₁₋₈alkyl)amino, (C₁₋₈alkyl)₂-amino-C₁₋₈alkyl-amino, [(C₁₋₈alkyl)₂-amino-C₁₋₈alkyl](C₁₋₈alkyl)amino, amino-C₁₋₈alkoxy, C₁₋₈alkyl-amino-C₁₋₈alkoxy, (C₁₋₈alkyl)₂-amino-C₁₋₈alkoxy, C₁₋₈alkoxy-C₁₋₈alkyl-amino-C₁₋₈alkoxy, C₁₋₈alkoxy-C₁₋₈alkyl-amino-C₁₋₈alkoxy, (C₁₋₈alkoxy-C₁₋₈alkyl)(C₁₋₈alkyl)amino-C₁₋₈alkoxy, amino-C₂₋₈alkenyl, C₁₋₈alkyl-amino-C₂₋₈alkenyl, (C₁₋₈alkyl)₂-amino-C₂₋₈alkenyl, amino-C₂₋₈alkynyl, C₁₋₈alkyl-amino-C₂₋₈alkynyl, (C₁₋₈alkyl)₂-amino-C₂₋₈alkynyl, halo-C₁₋₈alkyl-amino, (halo-C₁₋₈alkyl)₂-amino, (halo-C₁₋₈alkyl)(C₁₋₈alkyl)amino, hydroxy-C₁₋₈alkyl, hydroxy-C₁₋₈alkoxy-C₁₋₈alkyl, hydroxy-C₁₋₈alkyl-amino, (hydroxy-C₁₋₈alkyl)₂-amino, (hydroxy-C₁₋₈alkyl)(C₁₋₈alkyl)amino, hydroxy-C₁₋₈alkyl-amino-C₁₋₈alkyl, (hydroxy-C₁₋₈alkyl)₂-amino-C₁₋₈alkyl, (hydroxy-C₁₋₈alkyl)(C₁₋₈alkyl)amino-C₁₋₈alkyl, hydroxy-C₁₋₈alkyl-amino-C₁₋₈alkoxy, (hydroxy-C₁₋₈alkyl)₂-amino-C₁₋₈alkoxy, (hydroxy-C₁₋₈alkyl)(C₁₋₈alkyl)amino-C₁₋₈alkoxy, hydroxy-C₁₋₈alkyl-amino-C₁₋₈alkyl-amino, (hydroxy-C₁₋₈alkyl-amino-C₁₋₈alkyl)₂-amino, (hydroxy-C₁₋₈alkyl)₂-amino-C₁₋₈alkyl-amino, (hydroxy-C₁₋₈alkyl-amino-C₁₋₈alkyl)(C₁₋₈alkyl)amino, (hydroxy-C₁₋₈alkyl)(C₁₋₈alkyl)amino-C₁₋₈alkyl-amino, [(hydroxy-C₁₋₈alkyl)₂-amino-C₁₋₈alkyl](C₁₋₈alkyl)amino, [(hydroxy-C₁₋₈alkyl)(C₁₋₈alkyl)amino-C₁₋₈alkyl](C₁₋₈alkyl)amino, heterocyclyl, heterocyclyl-C₁₋₈alkyl, heterocyclyl-C₁₋₈alkoxy, heterocyclyl-amino, (heterocyclyl)(C₁₋₈alkyl)amino, heterocyclyl-amino-C₁₋₈alkyl, heterocyclyl-C₁₋₈alkyl-amino, (heterocyclyl-C₁₋₈alkyl)₂-amino, (heterocyclyl-C₁₋₈alkyl)(C₁₋₈alkyl)amino, heterocyclyl-C₁₋₈alkyl-amino-C₁₋₈alkyl, (heterocyclyl-C₁₋₈alkyl)₂-amino-C₁₋₈alkyl, (heterocyclyl-C₁₋₈alkyl)(C₁₋₈alkyl)amino-C₁₋₈alkyl, heterocyclyl-oxy, heterocyclyl-carbonyl, heterocyclyl-carbonyl-oxy, C₃₋₁₄cycloalkyl, aryl-C₁₋₈alkyl-amino, (aryl-C₁₋₈alkyl)₂-amino, (aryl-C₁₋₈alkyl)(C₁₋₈alkyl)amino, aryl-C₁₋₈alkyl-amino-C₁₋₈alkyl, (aryl-C₁₋₈alkyl)₂-amino-C₁₋₈alkyl, (aryl-C₁₋₈alkyl)(C₁₋₈alkyl)amino-C₁₋₈alkyl, heteroaryl, heteroaryl-C₁₋₈alkyl, heteroaryl-C₁₋₈alkoxy, heteroaryl-amino, heteroaryl-C₁₋₈alkyl-amino, (heteroaryl-C₁₋₈alkyl)₂-amino, (heteroaryl-C₁₋₈alkyl)(C₁₋₈alkyl)amino, heteroaryl-C₁₋₈alkyl-amino-C₁₋₈alkyl, (heteroaryl-C₁₋₈alkyl)₂-amino-C₁₋₈alkyl or (heteroaryl-C₁₋₈alkyl)(C₁₋₈alkyl)amino-C₁₋₈alkyl;
[0207] wherein, each instance of heterocyclyl, C₃₋₁₄cycloalkyl, aryl and heteroaryl is optionally substituted with one, two or three R₃ substituents and optionally, with one additional R₄ substituent; or,
[0208] wherein, each instance of heterocyclyl, C₃₋₁₄cycloalkyl, aryl and heteroaryl is optionally substituted with one, two, three or four R₃ substituents;
[0209] R₂ is aryl, aryl-amino, aryl-amino-carbonyl, heterocyclyl, heteroaryl or heteroaryl-amino;
[0210] wherein, each instance of aryl, heterocyclyl and heteroaryl is optionally substituted with one, two or three R₆ substituents and optionally, with one additional R₇ substituent;
[0211] Rₐ is, in each instance, independently selected from hydrogen, halogen, C₁₋₈alkyl or deuterium;
[0212] R_{b} is hydrogen, halogen, C₁₋₈alkyl, C₁₋₈alkoxy or deuterium;
[0213] R_{c} is hydrogen, halogen, C₁₋₈alkyl or deuterium;
[0214] R₃ is, in each instance, independently selected from cyano, halogen, hydroxy, oxo, C₁₋₈alkyl, halo-C₁₋₈alkyl, C₁₋₈alkyl-carbonyl, C₁₋₈alkoxy, halo-C₁₋₈alkoxy, C₁₋₈alkoxy-C₁₋₈alkyl, C₁₋₈alkoxy-carbonyl, amino, C₁₋₈alkyl-amino, (C₁₋₈alkyl)₂-amino, amino-C₁₋₈alkyl, C₁₋₈alkyl-amino-C₁₋₈alkyl, (C₁₋₈alkyl)₂-amino-C₁₋₈alkyl, amino-C₁₋₈alkyl-amino, C₁₋₈alkyl-amino-C₁₋₈alkyl-amino, (C₁₋₈alkyl-amino-C₁₋₈alkyl)₂-amino, (C₁₋₈alkyl)₂-amino-C₁₋₈alkyl-amino, [(C₁₋₈alkyl)₂-amino-C₁₋₈alkyl]₂-amino, (C₁₋₈alkyl-amino-C₁₋₈alkyl)C₁₋₈alkyl)amino, [(C₁₋₈alkyl)₂-amino-C₁₋₈alkyl](C₁₋₈alkyl)amino, C₁₋₈alkoxy-C₁₋₈alkyl-amino, (C₁₋₈alkoxy-C₁₋₈alkyl)₂-amino, (C₁₋₈alkoxy-C₁₋₈alkyl)(C₁₋₈alkyl)amino, C₁₋₈alkyl-carbonyl-amino, C₁₋₈alkoxy-carbonyl-amino, hydroxy-C₁₋₈alkyl, hydroxy-C₁₋₈alkoxy-C₁₋₈alkyl, hydroxy-C₁₋₈alkyl-amino, (hydroxy-C₁₋₈alkyl)₂-amino or (hydroxy-C₁₋₈alkyl)(C₁₋₈alkyl)amino;
[0215] R₄ is C₃₋₁₄cycloalkyl, C₃₋₁₄cycloalkyl-C₁₋₈alkyl, C₃₋₁₄cycloalkyl-amino, aryl-C₁₋₈alkyl, aryl-C₁₋₈alkoxy-carbonyl, aryl-sulfonyloxy-C₁₋₈alkyl, heterocyclyl or heterocyclyl-C₁₋₈alkyl; wherein, each instance of C₃₋₁₄cycloalkyl, aryl and heterocyclyl is optionally substituted with one, two or three R₅ substituents;
[0216] R₅ is, in each instance, independently selected from halogen, hydroxy, cyano, nitro, C₁₋₈alkyl, halo-C₁₋₈alkyl, C₁₋₈alkoxy, halo-C₁₋₈alkoxy, amino, C₁₋₈alkyl-amino, (C₁₋₈alkyl)₂-amino or C₁₋₈alkyl-thio;
[0217] R₆ is, in each instance, independently selected from halogen, hydroxy, cyano, nitro, C₁₋₈alkyl, C₂₋₈alkenyl, halo-C₁₋₈alkyl, hydroxy-C₁₋₈alkyl, C₁₋₈alkoxy, halo-C₁₋₈alkoxy, C₁₋₈alkoxy-C₁₋₈alkyl, amino, C₁₋₈alkyl-amino, (C₁₋₈alkyl)₂-amino or C₁₋₈alkyl-thio; and,
[0218] R₇ is C₃₋₁₄cycloalkyl, C₃₋₁₄cycloalkyl-oxy, aryl, heterocyclyl or heteroaryl.

[0219] In another aspect, provided herein is a method for modulating the amount of an RNA transcript comprising a RNA nucleotide sequence comprising in 5′ to 3′ order: a branch point, a 3′ splice site and an endogenous intronic recognition element for splicing modifier (iREMS); wherein the iREMS comprises an RNA sequence GAgurngn (SEQ ID NO: 2), wherein r is adenine or guanine and n is any nucleotide, and wherein the RNA transcript is an RNA transcript of a gene not disclosed in either International Publication No. WO 2015/105657, International Publication No. WO 2016/196386, or both; the method comprising contacting the RNA transcript with a compound of Formula (I) or a form thereof, wherein Formula (I) is:

[chemical structure]

[0220] wherein:
[0221] w₁ and w₅ are independently C—Rₐ or N;
[0222] w₂ is C—R_{b} or N;
[0223] w₃, w₄ and w₇ are independently C—R₁, C—R₂, C—Rₐ or N;
[0224] w₆ is C—R₁, C—R₂, C—R_{c} or N;
[0225] wherein one of w₃, w₄, w₆ and w₇ is C—R₁ and one other of w₃, w₄, w₆ and w₇ is C—R₂, provided that,
[0226] when w₃ is C—R₁, then w₆ is C—R₂ and w₄ and w₇ are independently C—Rₐ or N; or,
[0227] when w₃ is C—R₂, then w₆ is C—R₁ and w₄ and w₇ are independently C—Rₐ or N; or,
[0228] when w₄ is C—R₁, then w₇ is C—R₂ and w₃ is C—Rₐ or N and w₆ is C—R_{c} or N; or,
[0229] when w₄ is C—R₂, then w₇ is C—R₁ and w₃ is C—Rₐ or N and w₆ is C—R_{c} or N; and,
[0230] wherein any one, two or three of w₁, w₂, w₃, w₄, w₅, w₆ and w₇ may optionally be N;
[0231] R₁ is C₁₋₈alkyl, amino, C₁₋₈alkyl-amino, (C₁₋₈alkyl)₂-amino, C₁₋₈alkoxy-C₁₋₈alkyl-amino, (C₁₋₈alkoxy-C₁₋₈alkyl)₂-amino, (C₁₋₈alkoxy-C₁₋₈alkyl)(C₁₋₈alkyl)amino, amino-C₁₋₈alkyl, C₁₋₈alkyl-amino-C₁₋₈alkyl, (C₁₋₈alkyl)₂-amino-C₁₋₈alkyl, C₁₋₈alkoxy-C₁₋₈alkyl-amino-C₁₋₈alkyl, (C₁₋₈alkoxy-C₁₋₈alkyl)₂-amino-C₁₋₈alkyl, (C₁₋₈alkoxy-C₁₋₈alkyl)(C₁₋₈alkyl)amino-C₁₋₈alkyl, amino-C₁₋₈alkyl-amino, (amino-C₁₋₈alkyl)₂-amino, (amino-C₁₋₈alkyl)(C₁₋₈alkyl)amino, C₁₋₈alkyl-amino-C₁₋₈alkyl-amino, (C₁₋₈alkyl-amino-C₁₋₈alkyl)₂-amino, (C₁₋₈alkyl-amino-C₁₋₈alkyl)(C₁₋₈alkyl)amino, (C₁₋₈alkyl)₂-amino-C₁₋₈alkyl-amino, [(C₁₋₈alkyl)₂-amino-C₁₋₈alkyl](C₁₋₈alkyl)amino, amino-C₁₋₈alkoxy, C₁₋₈alkyl-amino-C₁₋₈alkoxy, (C₁₋₈alkyl)₂-amino-C₁₋₈alkoxy, C₁₋₈alkoxy-C₁₋₈alkyl-amino-C₁₋₈alkoxy, C₁₋₈alkoxy-C₁₋₈alkyl-amino-C₁₋₈alkoxy, (C₁₋₈alkoxy-C₁₋₈alkyl)(C₁₋₈alkyl)amino-C₁₋₈alkoxy, amino-C₂₋₈alkenyl, C₁₋₈alkyl-amino-C₂₋₈alkenyl, (C₁₋₈alkyl)₂-amino-C₂₋₈alkenyl, amino-C₂₋₈alkynyl, C₁₋₈alkyl-amino-C₂₋₈alkynyl, (C₁₋₈alkyl)₂-amino-C₂₋₈alkynyl, halo-C₁₋₈alkyl-amino, (halo-C₁₋₈alkyl)₂-amino, (halo-C₁₋₈alkyl)(C₁₋₈alkyl)amino, hydroxy-C₁₋₈alkyl, hydroxy-C₁₋₈alkoxy-C₁₋₈alkyl, hydroxy-C₁₋₈alkyl-amino, (hydroxy-C₁₋₈alkyl)₂-amino, (hydroxy-C₁₋₈alkyl)(C₁₋₈alkyl)amino, hydroxy-C₁₋₈alkyl-amino-C₁₋₈alkyl, (hydroxy-C₁₋₈alkyl)₂-amino-C₁₋₈alkyl, (hydroxy-C₁₋₈alkyl)(C₁₋₈alkyl)amino-C₁₋₈alkyl, hydroxy-C₁₋₈alkyl-amino-C₁₋₈alkoxy, (hydroxy-C₁₋₈alkyl)₂-amino-C₁₋₈alkoxy, (hydroxy-C₁₋₈alkyl)(C₁₋₈alkyl)amino-C₁₋₈alkoxy, hydroxy-C₁₋₈alkyl-amino-C₁₋₈alkyl-amino, (hydroxy-C₁₋₈alkyl-amino-C₁₋₈alkyl)₂-amino, (hydroxy-C₁₋₈alkyl)₂-amino-C₁₋₈alkyl-amino, (hydroxy-C₁₋₈alkyl-amino-C₁₋₈alkyl)(C₁₋₈alkyl)amino, (hydroxy-C₁₋₈alkyl)(C₁₋₈alkyl)amino-C₁₋₈alkyl-amino, [(hydroxy-C₁₋₈alkyl)₂-amino-C₁₋₈alkyl](C₁₋₈alkyl)amino, [(hydroxy-C₁₋₈alkyl)(C₁₋₈alkyl)amino-C₁₋₈alkyl](C₁₋₈alkyl)amino, heterocyclyl, heterocyclyl-C₁₋₈alkyl, heterocyclyl-C₁₋₈alkoxy, heterocyclyl-amino, (heterocyclyl)(C₁₋₈alkyl)amino, heterocyclyl-amino-C₁₋₈alkyl, heterocyclyl-C₁₋₈alkyl-amino, (heterocyclyl-C₁₋₈alkyl)₂-amino, (heterocyclyl-C₁₋₈alkyl)(C₁₋₈alkyl)amino, heterocyclyl-C₁₋₈alkyl-amino-C₁₋₈alkyl, (heterocyclyl-C₁₋₈alkyl)₂-amino-C₁₋₈alkyl, (heterocyclyl-C₁₋₈alkyl)(C₁₋₈alkyl)amino-C₁₋₈alkyl, heterocyclyl-oxy, heterocyclyl-carbonyl, heterocyclyl-carbonyl-oxy, C₃₋₁₄cycloalkyl, aryl-C₁₋₈alkyl-amino, (aryl-C₁₋₈alkyl)₂-amino, (aryl-C₁₋₈alkyl)(C₁₋₈alkyl)amino, aryl-C₁₋₈alkyl-amino-C₁₋₈alkyl, (aryl-C₁₋₈alkyl)₂-amino-C₁₋₈alkyl, (aryl-C₁₋₈alkyl)(C₁₋₈alkyl)amino-C₁₋₈alkyl, heteroaryl, heteroaryl-C₁₋₈alkyl, heteroaryl-C₁₋₈alkoxy, heteroaryl-amino, heteroaryl-C₁₋₈alkyl-amino, (heteroaryl-C₁₋₈alkyl)₂-amino, (heteroaryl-C₁₋₈alkyl)(C₁₋₈alkyl)amino, heteroaryl-C₁₋₈alkyl-amino-C₁₋₈alkyl, (heteroaryl-C₁₋₈alkyl)₂-amino-C₁₋₈alkyl or (heteroaryl-C₁₋₈alkyl)(C₁₋₈alkyl)amino-C₁₋₈alkyl;
[0232] wherein, each instance of heterocyclyl, C₃₋₁₄cycloalkyl, aryl and heteroaryl is optionally substituted with one, two or three R₃ substituents and optionally, with one additional R₄ substituent; or,
[0233] wherein, each instance of heterocyclyl, C3.14cycloalkyl, aryl and heteroaryl is optionally substituted with one, two, three or four R₃ substituents;
[0234] R₂ is aryl, aryl-amino, aryl-amino-carbonyl, heterocyclyl, heteroaryl or heteroaryl-amino;
[0235] wherein, each instance of aryl, heterocyclyl and heteroaryl is optionally substituted with one, two or three R₆ substituents and optionally, with one additional R₇ substituent;
[0236] Rₐ is, in each instance, independently selected from hydrogen, halogen, C₁₋₈alkyl or deuterium;
[0237] R_{b} is hydrogen, halogen, C₁₋₈alkyl, C₁₋₈alkoxy or deuterium;
[0238] R_{c} is hydrogen, halogen, C₁₋₈alkyl or deuterium;
[0239] R₃ is, in each instance, independently selected from cyano, halogen, hydroxy, oxo, C₁₋₈alkyl, halo-C₁₋₈alkyl, C₁₋₈alkyl-carbonyl, C₁₋₈alkoxy, halo-C₁₋₈alkoxy, C₁₋₈alkoxy-C₁₋₈alkyl, C₁₋₈alkoxy-carbonyl, amino, C₁₋₈alkyl-amino, (C₁₋₈alkyl)₂-amino, amino-C₁₋₈alkyl, C₁₋₈alkyl-amino-C₁₋₈alkyl, (C₁₋₈alkyl)₂-amino-C₁₋₈alkyl, amino-C₁₋₈alkyl-amino, C₁₋₈alkyl-amino-C₁₋₈alkyl-amino, (C₁₋₈alkyl-amino-C₁₋₈alkyl)₂-amino, (C₁₋₈alkyl)₂-amino-C₁₋₈alkyl-amino, [(C₁₋₈alkyl)₂-amino-C₁₋₈alkyl]₂-amino, (C₁₋₈alkyl-amino-C₁₋₈alkyl)(C₁₋₈alkyl)amino, [(C₁₋₈alkyl)₂-amino-C₁₋₈alkyl](C₁₋₈alkyl)amino, C₁₋₈alkoxy-C₁₋₈alkyl-amino, (C₁₋₈alkoxy-C₁₋₈alkyl)₂-amino, (C₁₋₈alkoxy-C₁₋₈alkyl)(C₁₋₈alkyl)amino, C₁₋₈alkyl-carbonyl-amino, C₁₋₈alkoxy-carbonyl-amino, hydroxy-C₁₋₈alkyl, hydroxy-C₁₋₈alkoxy-C₁₋₈alkyl, hydroxy-C₁₋₈alkyl-amino, (hydroxy-C₁₋₈alkyl)₂-amino or (hydroxy-C₁₋₈alkyl)(C₁₋₈alkyl)amino;
[0240] R₄ is C₃₋₁₄cycloalkyl, C₃₋₁₄cycloalkyl-C₁₋₈alkyl, C₃₋₁₄cycloalkyl-amino, aryl-C₁₋₈alkyl, aryl-C₁₋₈alkoxy-carbonyl, aryl-sulfonyloxy-C₁₋₈alkyl, heterocyclyl or heterocyclyl-C₁₋₈alkyl; wherein, each instance of C₃₋₁₄cycloalkyl, aryl and heterocyclyl is optionally substituted with one, two or three R₅ substituents;
[0241] R₅ is, in each instance, independently selected from halogen, hydroxy, cyano, nitro, C₁₋₈alkyl, halo-C₁₋₈alkyl, C₁₋₈alkoxy, halo-C₁₋₈alkoxy, amino, C₁₋₈alkyl-amino, (C₁₋₈alkyl)₂-amino or C₁₋₈alkyl-thio;
[0242] R₆ is, in each instance, independently selected from halogen, hydroxy, cyano, nitro, C₁₋₈alkyl, C₂₋₈alkenyl, halo-C₁₋₈alkyl, hydroxy-C₁₋₈alkyl, C₁₋₈alkoxy, halo-C₁₋₈alkoxy, C₁₋₈alkoxy-C₁₋₈alkyl, amino, C₁₋₈alkyl-amino, (C₁₋₈alkyl)₂-amino or C₁₋₈alkyl-thio; and,
[0243] R₇ is C₃₋₁₄cycloalkyl, C₃₋₁₄cycloalkyl-oxy, aryl, heterocyclyl or heteroaryl.

[0244] In another aspect, provided herein is a method for modulating the amount of an RNA transcript comprising a RNA nucleotide sequence comprising in 5′ to 3′ order: a branch point, a 3′ splice site and a non-endogenous intronic recognition element for splicing modifier (iREMS); wherein the iREMS comprises an RNA sequence GAgurngn (SEQ ID NO: 2), wherein r is adenine or guanine and n is any nucleotide, the method comprising contacting the RNA transcript with a compound of Formula (I) or a form thereof, wherein Formula (I) is:

[chemical structure]

[0245] wherein:
[0246] w₁ and w₅ are independently C—Rₐ or N;
[0247] w₂ is C—R_{b} or N;
[0248] w₃, w₄ and w₇ are independently C—R₁, C—R₂, C—Rₐ or N;
[0249] w₆ is C—R₁, C—R₂, C—R_{c} or N;
[0250] wherein one of w₃, w₄, w₆ and w₇ is C—R₁ and one other of w₃, w₄, w₆ and w₇ is C—R₂, provided that,
[0251] when w₃ is C—R₁, then w₆ is C—R₂ and w₄ and w₇ are independently C—Rₐ or N; or,
[0252] when w₃ is C—R₂, then w₆ is C—R₁ and w₄ and w₇ are independently C—Rₐ or N; or,
[0253] when w₄ is C—R₁, then w₇ is C—R₂ and w₃ is C—Rₐ or N and w₆ is C—R_{c} or N; or,
[0254] when w₄ is C—R₂, then w₇ is C—R₁ and w₃ is C—Rₐ or N and w₆ is C—R_{c} or N; and,
[0255] wherein any one, two or three of w₁, w₂, w₃, w₄, w₅, w₆ and w₇ may optionally be N;
[0256] R₁ is C₁₋₈alkyl, amino, C₁₋₈alkyl-amino, (C₁₋₈alkyl)₂-amino, C₁₋₈alkoxy-C₁₋₈alkyl-amino, (C₁₋₈alkoxy-C₁₋₈alkyl)₂-amino, (C₁₋₈alkoxy-C₁₋₈alkyl)(C₁₋₈alkyl)amino, amino-C₁₋₈alkyl, C₁₋₈alkyl-amino-C₁₋₈alkyl, (C₁₋₈alkyl)₂-amino-C₁₋₈alkyl, C₁₋₈alkoxy-C₁₋₈alkyl-amino-C₁₋₈alkyl, (C₁₋₈alkoxy-C₁₋₈alkyl)₂-amino-C₁₋₈alkyl, (C₁₋₈alkoxy-C₁₋₈alkyl)(C₁₋₈alkyl)amino-C₁₋₈alkyl, amino-C₁₋₈alkyl-amino, (amino-C₁₋₈alkyl)₂-amino, (amino-C₁₋₈alkyl)(C₁₋₈alkyl)amino, C₁₋₈alkyl-amino-C₁₋₈alkyl-amino, (C₁₋₈alkyl-amino-C₁₋₈alkyl)₂-amino, (C₁₋₈alkyl-amino-C₁₋₈alkyl)(C₁₋₈alkyl)amino, (C₁₋₈alkyl)₂-amino-C₁₋₈alkyl-amino, [(C₁₋₈alkyl)₂-amino-C₁₋₈alkyl](C₁₋₈alkyl)amino, amino-C₁₋₈alkoxy, C₁₋₈alkyl-amino-C₁₋₈alkoxy, (C₁₋₈alkyl)₂-amino-C₁₋₈alkoxy, C₁₋₈alkoxy-C₁₋₈alkyl-amino-C₁₋₈alkoxy, C₁₋₈alkoxy-C₁₋₈alkyl-amino-C₁₋₈alkoxy, (C₁₋₈alkoxy-C₁₋₈alkyl)(C₁₋₈alkyl)amino-C₁₋₈alkoxy, amino-C₂₋₈alkenyl, C₁₋₈alkyl-amino-C₂₋₈alkenyl, (C₁₋₈alkyl)₂-amino-C₂₋₈alkenyl, amino-C₂₋₈alkynyl, C₁₋₈alkyl-amino-C₂₋₈alkynyl, (C₁₋₈alkyl)₂-amino-C₂₋₈alkynyl, halo-C₁₋₈alkyl-amino, (halo-C₁₋₈alkyl)₂-amino, (halo-C₁₋₈alkyl)(C₁₋₈alkyl)amino, hydroxy-C₁₋₈alkyl, hydroxy-C₁₋₈alkoxy-C₁₋₈alkyl, hydroxy-C₁₋₈alkyl-amino, (hydroxy-C₁₋₈alkyl)₂-amino, (hydroxy-C₁₋₈alkyl)(C₁₋₈alkyl)amino, hydroxy-C₁₋₈alkyl-amino-C₁₋₈alkyl, (hydroxy-C₁₋₈alkyl)₂-amino-C₁₋₈alkyl, (hydroxy-C₁₋₈alkyl)(C₁₋₈alkyl)amino-C₁₋₈alkyl, hydroxy-C₁₋₈alkyl-amino-C₁₋₈alkoxy, (hydroxy-C₁₋₈alkyl)₂-amino-C₁₋₈alkoxy, (hydroxy-C₁₋₈alkyl)(C₁₋₈alkyl)amino-C₁₋₈alkoxy, hydroxy-C₁₋₈alkyl-amino-C₁₋₈alkyl-amino, (hydroxy-C₁₋₈alkyl-amino-C₁₋₈alkyl)₂-amino, (hydroxy-C₁₋₈alkyl)₂-amino-C₁₋₈alkyl-amino, (hydroxy-C₁₋₈alkyl-amino-C₁₋₈alkyl)(C₁₋₈alkyl)amino, (hydroxy-C₁₋₈alkyl)(C₁₋₈alkyl)amino-C₁₋₈alkyl-amino, [(hydroxy-C₁₋₈alkyl)₂-amino-C₁₋₈alkyl](C₁₋₈alkyl)amino, [(hydroxy-C₁₋₈alkyl)(C₁₋₈alkyl)amino-C₁₋₈alkyl](C₁₋₈alkyl)amino, heterocyclyl, heterocyclyl-C₁₋₈alkyl, heterocyclyl-C₁₋₈alkoxy, heterocyclyl-amino, (heterocyclyl)(C₁₋₈alkyl)amino, heterocyclyl-amino-C₁₋₈alkyl, heterocyclyl-C₁₋₈alkyl-amino, (heterocyclyl-C₁₋₈alkyl)₂-amino, (heterocyclyl-C₁₋₈alkyl)(C₁₋₈alkyl)amino, heterocyclyl-C₁₋₈alkyl-amino-C₁₋₈alkyl, (heterocyclyl-C₁₋₈alkyl)₂-amino-C₁₋₈alkyl, (heterocyclyl-C₁₋₈alkyl)(C₁₋₈alkyl)amino-C₁₋₈alkyl, heterocyclyl-oxy, heterocyclyl-carbonyl, heterocyclyl-carbonyl-oxy, C₃₋₁₄cycloalkyl, aryl-C₁₋₈alkyl-amino, (aryl-C₁₋₈alkyl)₂-amino, (aryl-C₁₋₈alkyl)(C₁₋₈alkyl)amino, aryl-C₁₋₈alkyl-amino-C₁₋₈alkyl, (aryl-C₁₋₈alkyl)₂-amino-C₁₋₈alkyl, (aryl-C₁₋₈alkyl)(C₁₋₈alkyl)amino-C₁₋₈alkyl, heteroaryl, heteroaryl-C₁₋₈alkyl, heteroaryl-C₁₋₈alkoxy, heteroaryl-amino, heteroaryl-C₁₋₈alkyl-amino, (heteroaryl-C₁₋₈alkyl)₂-amino, (heteroaryl-C₁₋₈alkyl)(C₁₋₈alkyl)amino, heteroaryl-C₁₋₈alkyl-amino-C₁₋₈alkyl, (heteroaryl-C₁₋₈alkyl)₂-amino-C₁₋₈alkyl or (heteroaryl-C₁₋₈alkyl)(C₁₋₈alkyl)amino-C₁₋₈alkyl;
[0257] wherein, each instance of heterocyclyl, C₃₋₁₄cycloalkyl, aryl and heteroaryl is optionally substituted with one, two or three R₃ substituents and optionally, with one additional R₄ substituent; or,
[0258] wherein, each instance of heterocyclyl, C₃₋₁₄cycloalkyl, aryl and heteroaryl is optionally substituted with one, two, three or four R₃ substituents;
[0259] R₂ is aryl, aryl-amino, aryl-amino-carbonyl, heterocyclyl, heteroaryl or heteroaryl-amino;
[0260] wherein, each instance of aryl, heterocyclyl and heteroaryl is optionally substituted with one, two or three R₆ substituents and optionally, with one additional R₇ substituent;
[0261] Rₐ is, in each instance, independently selected from hydrogen, halogen, C₁₋₈alkyl or deuterium;
[0262] R_{b} is hydrogen, halogen, C₁₋₈alkyl, C₁₋₈alkoxy or deuterium;
[0263] R_{c} is hydrogen, halogen, C₁₋₈alkyl or deuterium;
[0264] R₃ is, in each instance, independently selected from cyano, halogen, hydroxy, oxo, C₁₋₈alkyl, halo-C₁₋₈alkyl, C₁₋₈alkyl-carbonyl, C₁₋₈alkoxy, halo-C₁₋₈alkoxy, C₁₋₈alkoxy-C₁₋₈alkyl, C₁₋₈alkoxy-carbonyl, amino, C₁₋₈alkyl-amino, (C₁₋₈alkyl)₂-amino, amino-C₁₋₈alkyl, C₁₋₈alkyl-amino-C₁₋₈alkyl, (C₁₋₈alkyl)₂-amino-C₁₋₈alkyl, amino-C₁₋₈alkyl-amino, C₁₋₈alkyl-amino-C₁₋₈alkyl-amino, (C₁₋₈alkyl-amino-C₁₋₈alkyl)₂-amino, (C₁₋₈alkyl)₂-amino-C₁₋₈alkyl-amino, [(C₁₋₈alkyl)₂-amino-C₁₋₈alkyl]₂-amino, (C₁₋₈alkyl-amino-C₁₋₈alkyl)(C₁₋₈alkyl)amino, [(C₁₋₈alkyl)₂-amino-C₁₋₈alkyl](C₁₋₈alkyl)amino, C₁₋₈alkoxy-C₁₋₈alkyl-amino, (C₁₋₈alkoxy-C₁₋₈alkyl)₂-amino, (C₁₋₈alkoxy-C₁₋₈alkyl)(C₁₋₈alkyl)amino, C₁₋₈alkyl-carbonyl-amino, C₁₋₈alkoxy-carbonyl-amino, hydroxy-C₁₋₈alkyl, hydroxy-C₁₋₈alkoxy-C₁₋₈alkyl, hydroxy-C₁₋₈alkyl-amino, (hydroxy-C₁₋₈alkyl)₂-amino or (hydroxy-C₁₋₈alkyl)(C₁₋₈alkyl)amino;
[0265] R₄ is C₃₋₁₄cycloalkyl, C₃₋₁₄cycloalkyl-C₁₋₈alkyl, C₃₋₁₄cycloalkyl-amino, aryl-C₁₋₈alkyl, aryl-C₁₋₈alkoxy-carbonyl, aryl-sulfonyloxy-C₁₋₈alkyl, heterocyclyl or heterocyclyl-C₁₋₈alkyl; wherein, each instance of C₃₋₁₄cycloalkyl, aryl and heterocyclyl is optionally substituted with one, two or three R₅ substituents;
[0266] R₅ is, in each instance, independently selected from halogen, hydroxy, cyano, nitro, C₁₋₈alkyl, halo-C₁₋₈alkyl, C₁₋₈alkoxy, halo-C₁₋₈alkoxy, amino, C₁₋₈alkyl-amino, (C₁₋₈alkyl)₂-amino or C₁₋₈alkyl-thio;
[0267] R₆ is, in each instance, independently selected from halogen, hydroxy, cyano, nitro, C₁₋₈alkyl, C₂₋₈alkenyl, halo-C₁₋₈alkyl, hydroxy-C₁₋₈alkyl, C₁₋₈alkoxy, halo-C₁₋₈alkoxy, C₁₋₈alkoxy-C₁₋₈alkyl, amino, C₁₋₈alkyl-amino, (C₁₋₈alkyl)₂-amino or C₁₋₈alkyl-thio; and,
[0268] R₇ is C₃₋₁₄cycloalkyl, C₃₋₁₄cycloalkyl-oxy, aryl, heterocyclyl or heteroaryl.

[0269] In certain embodiments, the iREMS comprises an RNA sequence GAguragu (SEQ ID NO: 3866), wherein r is adenine or guanine and n is any nucleotide. In some embodiments, the iREMS comprises an RNA sequence NNGAgurngn (SEQ ID NO: 1), wherein r is adenine or guanine and n or N is any nucleotide. In a specific embodiment, the RNA sequence NNGAgurngn (SEQ ID NO: 1) is selected from the group consisting of ANGAgurngn (SEQ ID NO: 29), CNGAgurngn (SEQ ID NO: 35), GNGAgurngn (SEQ ID NO: 41), UNGAgurngn (SEQ ID NO: 47), NAGAgurngn (SEQ ID NO: 30), NCGAgurngn (SEQ ID NO: 36), NGGAgurngn (SEQ ID NO: 42), NUGAgurngn (SEQ ID NO: 48), AAGAgurngn (SEQ ID NO: 31), ACGAgurngn (SEQ ID NO: 37), AGGAgurngn (SEQ ID NO: 43), AUGAgurngn (SEQ ID NO: 49), CAGAgurngn (SEQ ID NO: 32), CCGAgurngn (SEQ ID NO: 38), CGGAgurngn (SEQ ID NO: 44), CUGAgurngn (SEQ ID NO: 50), GAGAgurngn (SEQ ID NO: 33), GCGAgurngn (SEQ ID NO: 39), GGGAgurngn (SEQ ID NO: 45), GUGAgurngn (SEQ ID NO: 51), UAGAgurngn (SEQ ID NO: 34), UCGAgurngn (SEQ ID NO: 40), UGGAgurngn (SEQ ID NO: 46) and UUGAgurngn (SEQ ID NO: 52), wherein r is adenine or guanine and n or N is any nucleotide. In certain embodiments, n is adenine or guanine.

[0270] In certain embodiments, the iREMS comprises an RNA sequence NNGAguragu (SEQ ID NO: 3862), wherein r is adenine or guanine and N is any nucleotide. In a specific embodiment, the RNA sequence NNGAguragu (SEQ ID NO: 3862) is selected from the group consisting of ANGAguragu (SEQ ID NO: 437), CNGAguragu (SEQ ID NO: 443), GNGAguragu (SEQ ID NO: 449), UNGAguragu (SEQ ID NO: 455), NAGAguragu (SEQ ID NO: 438), NCGAguragu (SEQ ID NO: 444), NGGAguragu (SEQ ID NO: 450), NUGAguragu (SEQ ID NO: 456), AAGAguragu (SEQ ID NO: 439), ACGAguragu (SEQ ID NO: 445), AGGAguragu (SEQ ID NO: 451), AUGAguragu (SEQ ID NO: 457), CAGAguragu (SEQ ID NO: 440), CCGAguragu (SEQ ID NO: 446), CGGAguragu (SEQ ID NO: 452), CUGAguragu (SEQ ID NO: 458), GAGAguragu (SEQ ID NO: 441), GCGAguragu (SEQ ID NO: 447), GGGAguragu (SEQ ID NO: 453), GUGAguragu (SEQ ID NO: 459), UAGAguragu (SEQ ID NO: 442), UCGAguragu (SEQ ID NO: 448), UGGAguragu (SEQ ID NO: 454) and UUGAguragu (SEQ ID NO: 460), wherein r is adenine or guanine, and N is any nucleotide. the iREMS comprises an RNA sequence presented in Table 13. In certain embodiments, n is adenine or guanine.

[0271] In another aspect, provided herein is a method for modulating the amount of an RNA transcript produced from a DNA sequence comprising a DNA nucleotide sequence encoding exons and one or more introns, comprising in 5′ to 3′ order: a branch point, a 3′ splice site and an endogenous iREMS; wherein the iREMS comprises a DNA sequence GAgtrngn (SEQ ID NO: 4), wherein r is adenine or guanine and n is any nucleotide, the method comprising contacting the RNA transcript with a compound of Formula (I) or a form thereof, wherein Formula (I) is:

[chemical structure]

[0272] wherein:
[0273] w₁ and w₅ are independently C—Rₐ or N;
[0274] w₂ is C—R_{b} or N;
[0275] w₃, w₄ and w₇ are independently C—R₁, C—R₂, C—Rₐ or N;
[0276] w₆ is C—R₁, C—R₂, C—R_{c} or N;
[0277] wherein one of w₃, w₄, w₆ and w₇ is C—R₁ and one other of w₃, w₄, w₆ and w₇ is C—R₂, provided that,
[0278] when w₃ is C—R₁, then w₆ is C—R₂ and w₄ and w₇ are independently C—Rₐ or N; or,
[0279] when w₃ is C—R₂, then w₆ is C—R₁ and w₄ and w₇ are independently C—Rₐ or N; or,
[0280] when w₄ is C—R₁, then w₇ is C—R₂ and w₃ is C—Rₐ or N and w₆ is C—R_{c} or N; or,
[0281] when w₄ is C—R₂, then w₇ is C—R₁ and w₃ is C—Rₐ or N and w₆ is C—R_{c} or N; and,
[0282] wherein any one, two or three of w₁, w₂, w₃, w₄, w₅, w₆ and w₇ may optionally be N;
[0283] R₁ is C₁₋₈alkyl, amino, C₁₋₈alkyl-amino, (C₁₋₈alkyl)₂-amino, C₁₋₈alkoxy-C₁₋₈alkyl-amino, (C₁₋₈alkoxy-C₁₋₈alkyl)₂-amino, (C₁₋₈alkoxy-C₁₋₈alkyl)(C₁₋₈alkyl)amino, amino-C₁₋₈alkyl, C₁₋₈alkyl-amino-C₁₋₈alkyl, (C₁₋₈alkyl)₂-amino-C₁₋₈alkyl, C₁₋₈alkoxy-C₁₋₈alkyl-amino-C₁₋₈alkyl, (C₁₋₈alkoxy-C₁₋₈alkyl)₂-amino-C₁₋₈alkyl, (C₁₋₈alkoxy-C₁₋₈alkyl)(C₁₋₈alkyl)amino-C₁₋₈alkyl, amino-C₁₋₈alkyl-amino, (amino-C₁₋₈alkyl)₂-amino, (amino-C₁₋₈alkyl)(C₁₋₈alkyl)amino, C₁₋₈alkyl-amino-C₁₋₈alkyl-amino, (C₁₋₈alkyl-amino-C₁₋₈alkyl)₂-amino, (C₁₋₈alkyl-amino-C₁₋₈alkyl)(C₁₋₈alkyl)amino, (C₁₋₈alkyl)₂-amino-C₁₋₈alkyl-amino, [(C₁₋₈alkyl)₂-amino-C₁₋₈alkyl](C₁₋₈alkyl)amino, amino-C₁₋₈alkoxy, C₁₋₈alkyl-amino-C₁₋₈alkoxy, (C₁₋₈alkyl)₂-amino-C₁₋₈alkoxy, C₁₋₈alkoxy-C₁₋₈alkyl-amino-C₁₋₈alkoxy, C₁₋₈alkoxy-C₁₋₈alkyl-amino-C₁₋₈alkoxy, (C₁₋₈alkoxy-C₁₋₈alkyl)(C₁₋₈alkyl)amino-C₁₋₈alkoxy, amino-C₂₋₈alkenyl, C₁₋₈alkyl-amino-C₂₋₈alkenyl, (C₁₋₈alkyl)₂-amino-C₂₋₄alkenyl, amino-C₂₋₈alkynyl, C₁₋₈alkyl-amino-C₂₋₈alkynyl, (C₁₋₈alkyl)₂-amino-C₂₋₈alkynyl, halo-C₁₋₈alkyl-amino, (halo-C₁₋₈alkyl)₂-amino, (halo-C₁₋₈alkyl)(C₁₋₈alkyl)amino, hydroxy-C₁₋₈alkyl, hydroxy-C₁₋₈alkoxy-C₁₋₈alkyl, hydroxy-C₁₋₈alkyl-amino, (hydroxy-C₁₋₈alkyl)₂-amino, (hydroxy-C₁₋₈alkyl)(C₁₋₈alkyl)amino, hydroxy-C₁₋₈alkyl-amino-C₁₋₈alkyl, (hydroxy-C₁₋₈alkyl)₂-amino-C₁₋₈alkyl, (hydroxy-C₁₋₈alkyl)(C₁₋₈alkyl)amino-C₁₋₈alkyl, hydroxy-C₁₋₈alkyl-amino-C₁₋₈alkoxy, (hydroxy-C₁₋₈alkyl)₂-amino-C₁₋₈alkoxy, (hydroxy-C₁₋₈alkyl)(C₁₋₈alkyl)amino-C₁₋₈alkoxy, hydroxy-C₁₋₈alkyl-amino-C₁₋₈alkyl-amino, (hydroxy-C₁₋₈alkyl-amino-C₁₋₈alkyl)₂-amino, (hydroxy-C₁₋₈alkyl)₂-amino-C₁₋₈alkyl-amino, (hydroxy-C₁₋₈alkyl-amino-C₁₋₈alkyl)(C₁₋₈alkyl)amino, (hydroxy-C₁₋₈alkyl)(C₁₋₈alkyl)amino-C₁₋₈alkyl-amino, [(hydroxy-C₁₋₈alkyl)₂-amino-C₁₋₈alkyl](C₁₋₈alkyl)amino, [(hydroxy-C₁₋₈alkyl)(C₁₋₈alkyl)amino-C₁₋₈alkyl](C₁₋₈alkyl)amino, heterocyclyl, heterocyclyl-C₁₋₈alkyl, heterocyclyl-C₁₋₈alkoxy, heterocyclyl-amino, (heterocyclyl)(C₁₋₈alkyl)amino, heterocyclyl-amino-C₁₋₈alkyl, heterocyclyl-C₁₋₈alkyl-amino, (heterocyclyl-C₁₋₈alkyl)₂-amino, (heterocyclyl-C₁₋₈alkyl)(C₁₋₈alkyl)amino, heterocyclyl-C₁₋₈alkyl-amino-C₁₋₈alkyl, (heterocyclyl-C₁₋₈alkyl)₂-amino-C₁₋₈alkyl, (heterocyclyl-C₁₋₈alkyl)(C₁₋₈alkyl)amino-C₁₋₈alkyl, heterocyclyl-oxy, heterocyclyl-carbonyl, heterocyclyl-carbonyl-oxy, C₃₋₁₄cycloalkyl, aryl-C₁₋₈alkyl-amino, (aryl-C₁₋₈alkyl)₂-amino, (aryl-C₁₋₈alkyl)(C₁₋₈alkyl)amino, aryl-C₁₋₈alkyl-amino-C₁₋₈alkyl, (aryl-C₁₋₈alkyl)₂-amino-C₁₋₈alkyl, (aryl-C₁₋₈alkyl)(C₁₋₈alkyl)amino-C₁₋₈alkyl, heteroaryl, heteroaryl-C₁₋₈alkyl, heteroaryl-C₁₋₈alkoxy, heteroaryl-amino, heteroaryl-C₁₋₈alkyl-amino, (heteroaryl-C₁₋₈alkyl)₂-amino, (heteroaryl-C₁₋₈alkyl)(C₁₋₈alkyl)amino, heteroaryl-C₁₋₈alkyl-amino-C₁₋₈alkyl, (heteroaryl-C₁₋₈alkyl)₂-amino-C₁₋₈alkyl or (heteroaryl-C₁₋₈alkyl)(C₁₋₈alkyl)amino-C₁₋₈alkyl;
[0284] wherein, each instance of heterocyclyl, C₃₋₁₄cycloalkyl, aryl and heteroaryl is optionally substituted with one, two or three R₃ substituents and optionally, with one additional R₄ substituent; or,
[0285] wherein, each instance of heterocyclyl, C₃₋₁₄cycloalkyl, aryl and heteroaryl is optionally substituted with one, two, three or four R₃ substituents;
[0286] R₂ is aryl, aryl-amino, aryl-amino-carbonyl, heterocyclyl, heteroaryl or heteroaryl-amino;
[0287] wherein, each instance of aryl, heterocyclyl and heteroaryl is optionally substituted with one, two or three R₆ substituents and optionally, with one additional R₇ substituent;
[0288] Rₐ is, in each instance, independently selected from hydrogen, halogen, C₁₋₈alkyl or deuterium;
[0289] R_{b} is hydrogen, halogen, C₁₋₈alkyl, C₁₋₈alkoxy or deuterium;
[0290] R_{c} is hydrogen, halogen, C₁₋₈alkyl or deuterium;
[0291] R₃ is, in each instance, independently selected from cyano, halogen, hydroxy, oxo, C₁₋₈alkyl, halo-C₁₋₈alkyl, C₁₋₈alkyl-carbonyl, C₁₋₈alkoxy, halo-C₁₋₈alkoxy, C₁₋₈alkoxy-C₁₋₈alkyl, C₁₋₈alkoxy-carbonyl, amino, C₁₋₈alkyl-amino, (C₁₋₈alkyl)₂-amino, amino-C₁₋₈alkyl, C₁₋₈alkyl-amino-C₁₋₈alkyl, (C₁₋₈alkyl)₂-amino-C₁₋₈alkyl, amino-C₁₋₈alkyl-amino, C₁₋₈alkyl-amino-C₁₋₈alkyl-amino, (C₁₋₈alkyl-amino-C₁₋₈alkyl)₂-amino, (C₁₋₈alkyl)₂-amino-C₁₋₈alkyl-amino, [(C₁₋₈alkyl)₂-amino-C₁₋₈alkyl]₂-amino, (C₁₋₈alkyl-amino-C₁₋₈alkyl)(C₁₋₈alkyl)amino, [(C₁₋₈alkyl)₂-amino-C₁₋₈alkyl](C₁₋₈alkyl)amino, C₁₋₈alkoxy-C₁₋₈alkyl-amino, (C₁₋₈alkoxy-C₁₋₈alkyl)₂-amino, (C₁₋₈alkoxy-C₁₋₈alkyl)(C₁₋₈alkyl)amino, C₁₋₈alkyl-carbonyl-amino, C₁₋₈alkoxy-carbonyl-amino, hydroxy-C₁₋₈alkyl, hydroxy-C₁₋₈alkoxy-C₁₋₈alkyl, hydroxy-C₁₋₈alkyl-amino, (hydroxy-C₁₋₈alkyl)₂-amino or (hydroxy-C₁₋₈alkyl)(C₁₋₈alkyl)amino;
[0292] R₄ is C₃₋₁₄cycloalkyl, C₃₋₁₄cycloalkyl-C₁₋₈alkyl, C₃₋₁₄cycloalkyl-amino, aryl-C₁₋₈alkyl, aryl-C₁₋₈alkoxy-carbonyl, aryl-sulfonyloxy-C₁₋₈alkyl, heterocyclyl or heterocyclyl-C₁₋₈alkyl; wherein, each instance of C₃₋₁₄cycloalkyl, aryl and heterocyclyl is optionally substituted with one, two or three R₅ substituents;
[0293] R₅ is, in each instance, independently selected from halogen, hydroxy, cyano, nitro, C₁₋₈alkyl, halo-C₁₋₈alkyl, C₁₋₈alkoxy, halo-C₁₋₈alkoxy, amino, C₁₋₈alkyl-amino, (C₁₋₈alkyl)₂-amino or C₁₋₈alkyl-thio;
[0294] R₆ is, in each instance, independently selected from halogen, hydroxy, cyano, nitro, C₁₋₈alkyl, C₂₋₈alkenyl, halo-C₁₋₈alkyl, hydroxy-C₁₋₈alkyl, C₁₋₈alkoxy, halo-C₁₋₈alkoxy, C₁₋₈alkoxy-C₁₋₈alkyl, amino, C₁₋₈alkyl-amino, (C₁₋₈alkyl)₂-amino or C₁₋₈alkyl-thio; and,
[0295] R₇ is C₃₋₁₄cycloalkyl, C₃₋₁₄cycloalkyl-oxy, aryl, heterocyclyl or heteroaryl.

[0296] In a specific embodiment, the DNA sequence is in a gene selected from: ABCA10, ABCB8, ABCC3, ACTA2, ADAL, ADAMTS1, ADCY3, ADD1, ADGRG6, ADH6, ADHFE1, AFF3, AGPAT4, AKAP3, ANK1, ANK3, ANKRA2, ANKRD33B, ANKRD36, AP4B1-AS1, APIP, ARHGAP1, ARHGAP12, ARHGEF16, ARID5B, ARL15, ARL9, ARMCX6, ASIC1, ATG5, ATP2A3, ATXN1, B3GALT2, B3GNT6, BCL2L15, BCYRN1, BECN1, BHMT2, BIN3-TT1, BIRC3, BIRC6, BTG2, BTN3A1, C10orf54, C11orf70, C11orf94, C12orf4, C12orf56, C14orf132, C19orf47, C1orf86, C3, C7orf31, C8orf34, C8orf44, C8orf44-SGK3, C8orf88, CA13, CA3, CACNA2D2, CACNB1, CADM1, CAND2, CASP7, CCDC122, CCDC79, CCER2, CCNF, CECR7, CELSR1, CEMIP, CENPI, CEP112, CEP170, CEP192, CFH, CHEK1, CIITA, CLDN23, CLTA, CMAHP, CNGA4, CNRIP1, CNTD1, COL11A1, COL14A1, COL15A1, COL5A1, COL5A3, COL6A6, COL8A1, COLEC12, COMP, CPA4, CPQ, CPSF4, CRISPLD2, CRLF1, CRYBG3, CRYL1, CSNK1E, CSNK1G1, CYB5R2, CYGB, CYP1B1, DAGLB, DCAF17, DCLK1, DCN, DDIT4L, DDX50, DEGS1, DEPTOR, DFNB59, DIRAS3, DLG5, DLGAP4, DNAH8, DNAJC13, DNAJC27, DNMBP, DOCK11, DYNC1I1, DYRK1A, DZIP1L, EFEMP1, EGR3, ELN, ELP4, EMX2OS, ENAH, ENPP1, EP300, ERCC1, ERCC8, ERGIC3, ERLIN2, ERRFI1, ESM1, EVC, EVC2, F2R, FAIM, FAM126A, FAM13A, FAM160A1, FAM162A, FAM174A, FAM20A, FAM46B, FAM65B, FAP, FARP1, FBLN2, FBN2, FBXL6, FCHO1, FGFR2, FGL2, FLT1, FRAS1, FSCN2, GAL3ST4, GALNT15, GATA6, GBGT1, GCNT1, GDF6, GGACT, GLCE, GNAQ, GPR183, GPR50, GPRC5A, GPRC5B, GRTP1, GUCA1B, GULP1, GXYLT1, HAPLN1, HAPLN2, HAS3, HAVCR2, HDAC5, HDX, HECTD2-AS1, HEPH, HEY1, HMGA2, HMGN3-AS1, HNMT, HOOK3, HPS1, HSPA1L, HTATIP2, IFT57, IGDCC4, IGF2R, IGFBP3, IL16, INA, INPP5K, INTU, IQCG, ITGA11, ITGA8, ITGB8, ITIH1, ITPKA, IVD, KAT6B, KCNS1, KCNS2, KDM6A, KDSR, KIAA1456, KIAA1462, KIAA1755, KIT, KLF17, KLRG1, KMT2D, KRT7, KRTAP1-1, KRTAP1-5, L3MBTL2, LAMB2P1, LETM2, LGI2, LGR4, LHX9, LINC00472, LINC00570, LINC00578, LINC00607, LINC00678, LINC00702, LINC00886, LINC00961, LINC01011, LINC01118, LINC01204, LMOD1, LOC400927, LRBA, LRP4, LRRC32, LRRC39, LRRC42, LSAMP, LUM, LYPD1, LYRM1, MAFB, MAMDC2, MAN2A1, MAN2C1, MAPK13, MASP1, MB, MB21D2, MC4R, MCM10, MED13L, MEGF6, MFN2, MIAT, MIR612, MLLT10, MMP10, MMP24, MN1, MOXD1, MRPL45, MRPL55, MRPS28, MRVI1, MSH4, MTERF3, MXRA5, MYCBP2, NA, NAALADL2, NAE1, NAGS, NDNF, NGF, NGFR, NHLH1, NLN, NOTCH3, NOTUM, NOVA2, NOX4, NRROS, OCLN, OLR1, OSBPL10, OXCT1, OXCT2, PAIP2B, PBLD, PDE1C, PDE5A, PDGFD, PDGFRB, PDS5B, PEAR1, PHACTR3, PIGN, P1K3CD, P1K3R₁, PIKFYVE, PIM2, PITPNM3, PLEK2, PLEKHA1, PLEKHA6, PLEKHH2, PLSCR1, PNISR, PODN, POLN, POLR1A, POMT2, PPARG, PPIP5K2, PPM1E, PPP1R26, PPP3CA, PRKCA, PRKG1, PRPF31, PRPH2, PRRG4, PRUNE2, PSMD6-AS2, PTGIS, PTX3, PXK, RAB30, RAB38, RAB44, RAD9B, RAF1, RAPGEF1, RARS, RARS2, RBBP8, RBKS, RDX, RERE, RFX3-AS1, RGCC, ROR1, ROR2, RPA1, RPS10, RPS6KB2, SAMD4A, SCARNA9, SEC24A, SENP6, SERGEF, SGK3, SH3YL1, SHROOM3, SIGLEC10, SKA2, SLC12A2, SLC24A3, SLC35F3, SLC39A10, SLC44A2, SLC46A2, SLC4A11, SLC6A15, SLC7A11, SLC9A3, SLIT3, SMG1P3, SMTN, SNED1, SNX7, SORBS2, SORCS2, SOX7, SPATA18, SPATA5, SPDYA, SPEF2, SPIDR, SPRYD7, SRGAP1, SRRM1, STAC2, STAT4, STK32B, STRN4, STS, STXBP6, SULF1, SVEP1, SYNGR2, SYNPO, SYNPO2, SYNPO2L, TAGLN3, TANGO6, TASP1, TCF12, TCF4, TGFA, TGFB2, TGFB3, TGM2, THBS2, TIAM1, TMC3, TMEM102, TMEM119, TMEM134, TMEM189-UBE2V1, TMEM214, TMEM256-PLSCR3, TMEM50B, TNFAIP8L3, TNFRSF14, TNRC18P1, TNRC6A, TNXB, TP53AIP1, TPRG1, TRIM66, TRPC4, TSHZ2, TSPAN11, TSPAN18, TSPAN7, TSSK3, TTC7B, TUBE1, TXNIP, TYW5, URGCP, USP27X, UVRAG, VAV2, VIM-AS1, VPS41, VSTM2L, VWF, WDR27, WDR91, WISP1, WNK1, WNT10B, YDJC, ZBTB26, ZCCHC5, ZCCHC8, ZFP82, ZMIZ1-AS1, ZNF138, ZNF212, ZNF232, ZNF350, ZNF431, ZNF660, ZNF680, ZNF79, or ZNF837. In another specific embodiment, the DNA sequence is a gene not disclosed in either International Publication No. WO 2015/105657, International Publication No. WO 2016/196386, or both.

[0297] In another aspect, provided herein is a method for modulating the amount of an RNA transcript produced from a DNA sequence comprising a DNA nucleotide sequence encoding exons and one or more introns, comprising in 5′ to 3′ order: a branch point, a 3′ splice site and a non-endogenous iREMS; wherein the iREMS comprises a DNA sequence GAgtrngn (SEQ ID NO: 4), wherein r is adenine or guanine and n is any nucleotide, the method comprising contacting the RNA transcript with a compound of Formula (I) or a form thereof, wherein Formula (I) is:

[chemical structure]

[0298] wherein:
[0299] w₁ and w₅ are independently C—Rₐ or N;
[0300] w₂ is C—R_{b} or N;
[0301] w₃, w₄ and w₇ are independently C—R₁, C—R₂, C—Rₐ or N;
[0302] w₆ is C—R₁, C—R₂, C—R_{c} or N;
[0303] wherein one of w₃, w₄, w₆ and w₇ is C—R₁ and one other of w₃, w₄, w₆ and w₇ is C—R₂, provided that,
[0304] when w₃ is C—R₁, then w₆ is C—R₂ and w₄ and w₇ are independently C—Rₐ or N; or,
[0305] when w₃ is C—R₂, then w₆ is C—R₁ and w₄ and w₇ are independently C—Rₐ or N; or,
[0306] when w₄ is C—R₁, then w₇ is C—R₂ and w₃ is C—Rₐ or N and w₆ is C—R_{c} or N; or,
[0307] when w₄ is C—R₂, then w₇ is C—R₁ and w₃ is C—Rₐ or N and w₆ is C—R_{c} or N; and,
[0308] wherein any one, two or three of w₁, w₂, w₃, w₄, w₅, w₆ and w₇ may optionally be N;
[0309] R₁ is C₁₋₈alkyl, amino, C₁₋₈alkyl-amino, (C₁₋₈alkyl)₂-amino, C₁₋₈alkoxy-C₁₋₈alkyl-amino, (C₁₋₈alkoxy-C₁₋₈alkyl)₂-amino, (C₁₋₈alkoxy-C₁₋₈alkyl)(C₁₋₈alkyl)amino, amino-C₁₋₈alkyl, C₁₋₈alkyl-amino-C₁₋₈alkyl, (C₁₋₈alkyl)₂-amino-C₁₋₈alkyl, C₁₋₈alkoxy-C₁₋₈alkyl-amino-C₁₋₈alkyl, (C₁₋₈alkoxy-C₁₋₈alkyl)₂-amino-C₁₋₈alkyl, (C₁₋₈alkoxy-C₁₋₈alkyl)(C₁₋₈alkyl)amino-C₁₋₈alkyl, amino-C₁₋₈alkyl-amino, (amino-C₁₋₈alkyl)₂-amino, (amino-C₁₋₈alkyl)(C₁₋₈alkyl)amino, C₁₋₈alkyl-amino-C₁₋₈alkyl-amino, (C₁₋₈alkyl-amino-C₁₋₈alkyl)₂-amino, (C₁₋₈alkyl-amino-C₁₋₈alkyl)(C₁₋₈alkyl)amino, (C₁₋₈alkyl)₂-amino-C₁₋₈alkyl-amino, [(C₁₋₈alkyl)₂-amino-C₁₋₈alkyl](C₁₋₈alkyl)amino, amino-C₁₋₈alkoxy, C₁₋₈alkyl-amino-C₁₋₈alkoxy, (C₁₋₈alkyl)₂-amino-C₁₋₈alkoxy, C₁₋₈alkoxy-C₁₋₈alkyl-amino-C₁₋₈alkoxy, C₁₋₈alkoxy-C₁₋₈alkyl-amino-C₁₋₈alkoxy, (C₁₋₈alkoxy-C₁₋₈alkyl)(C₁₋₈alkyl)amino-C₁₋₈alkoxy, amino-C₂₋₈alkenyl, C₁₋₈alkyl-amino-C₂₋₈alkenyl, (C₁₋₈alkyl)₂-amino-C₂₋₈alkenyl, amino-C₂₋₈alkynyl, C₁₋₈alkyl-amino-C₂₋₈alkynyl, (C₁₋₈alkyl)₂-amino-C₂₋₈alkynyl, halo-C₁₋₈alkyl-amino, (halo-C₁₋₈alkyl)₂-amino, (halo-C₁₋₈alkyl)(C₁₋₈alkyl)amino, hydroxy-C₁₋₈alkyl, hydroxy-C₁₋₈alkoxy-C₁₋₈alkyl, hydroxy-C₁₋₈alkyl-amino, (hydroxy-C₁₋₈alkyl)₂-amino, (hydroxy-C₁₋₈alkyl)(C₁₋₈alkyl)amino, hydroxy-C₁₋₈alkyl-amino-C₁₋₈alkyl, (hydroxy-C₁₋₈alkyl)₂-amino-C₁₋₈alkyl, (hydroxy-C₁₋₈alkyl)(C₁₋₈alkyl)amino-C₁₋₈alkyl, hydroxy-C₁₋₈alkyl-amino-C₁₋₈alkoxy, (hydroxy-C₁₋₈alkyl)₂-amino-C₁₋₈alkoxy, (hydroxy-C₁₋₈alkyl)(C₁₋₈alkyl)amino-C₁₋₈alkoxy, hydroxy-C₁₋₈alkyl-amino-C₁₋₈alkyl-amino, (hydroxy-C₁₋₈alkyl-amino-C₁₋₈alkyl)₂-amino, (hydroxy-C₁₋₈alkyl)₂-amino-C₁₋₈alkyl-amino, (hydroxy-C₁₋₈alkyl-amino-C₁₋₈alkyl)(C₁₋₈alkyl)amino, (hydroxy-C₁₋₈alkyl)(C₁₋₈alkyl)amino-C₁₋₈alkyl-amino, [(hydroxy-C₁₋₈alkyl)₂-amino-C₁₋₈alkyl](C₁₋₈alkyl)amino, [(hydroxy-C₁₋₈alkyl)(C₁₋₈alkyl)amino-C₁₋₈alkyl](C₁₋₈alkyl)amino, heterocyclyl, heterocyclyl-C₁₋₈alkyl, heterocyclyl-C₁₋₈alkoxy, heterocyclyl-amino, (heterocyclyl)(C₁₋₈alkyl)amino, heterocyclyl-amino-C₁₋₈alkyl, heterocyclyl-C₁₋₈alkyl-amino, (heterocyclyl-C₁₋₈alkyl)₂-amino, (heterocyclyl-C₁₋₈alkyl)(C₁₋₈alkyl)amino, heterocyclyl-C₁₋₈alkyl-amino-C₁₋₈alkyl, (heterocyclyl-C₁₋₈alkyl)₂-amino-C₁₋₈alkyl, (heterocyclyl-C₁₋₈alkyl)(C₁₋₈alkyl)amino-C₁₋₈alkyl, heterocyclyl-oxy, heterocyclyl-carbonyl, heterocyclyl-carbonyl-oxy, C₃₋₁₄cycloalkyl, aryl-C₁₋₈alkyl-amino, (aryl-C₁₋₈alkyl)₂-amino, (aryl-C₁₋₈alkyl)(C₁₋₈alkyl)amino, aryl-C₁₋₈alkyl-amino-C₁₋₈alkyl, (aryl-C₁₋₈alkyl)₂-amino-C₁₋₈alkyl, (aryl-C₁₋₈alkyl)(C₁₋₈alkyl)amino-C₁₋₈alkyl, heteroaryl, heteroaryl-C₁₋₈alkyl, heteroaryl-C₁₋₈alkoxy, heteroaryl-amino, heteroaryl-C₁₋₈alkyl-amino, (heteroaryl-C₁₋₈alkyl)₂-amino, (heteroaryl-C₁₋₈alkyl)(C₁₋₈alkyl)amino, heteroaryl-C₁₋₈alkyl-amino-C₁₋₈alkyl, (heteroaryl-C₁₋₈alkyl)₂-amino-C₁₋₈alkyl or (heteroaryl-C₁₋₈alkyl)(C₁₋₈alkyl)amino-C₁₋₈alkyl;
[0310] wherein, each instance of heterocyclyl, C₃₋₁₄cycloalkyl, aryl and heteroaryl is optionally substituted with one, two or three R₃ substituents and optionally, with one additional R₄ substituent; or,
[0311] wherein, each instance of heterocyclyl, C₃₋₁₄cycloalkyl, aryl and heteroaryl is optionally substituted with one, two, three or four R₃ substituents;
[0312] R₂ is aryl, aryl-amino, aryl-amino-carbonyl, heterocyclyl, heteroaryl or heteroaryl-amino;
[0313] wherein, each instance of aryl, heterocyclyl and heteroaryl is optionally substituted with one, two or three R₆ substituents and optionally, with one additional R₇ substituent;
[0314] Rₐ is, in each instance, independently selected from hydrogen, halogen, C₁₋₈alkyl or deuterium;
[0315] R_{b} is hydrogen, halogen, C₁₋₈alkyl, C₁₋₈alkoxy or deuterium;
[0316] R_{c} is hydrogen, halogen, C₁₋₈alkyl or deuterium;
[0317] R₃ is, in each instance, independently selected from cyano, halogen, hydroxy, oxo, C₁₋₈alkyl, halo-C₁₋₈alkyl, C₁₋₈alkyl-carbonyl, C₁₋₈alkoxy, halo-C₁₋₈alkoxy, C₁₋₈alkoxy-C₁₋₈alkyl, C₁₋₈alkoxy-carbonyl, amino, C₁₋₈alkyl-amino, (C₁₋₈alkyl)₂-amino, amino-C₁₋₈alkyl, C₁₋₈alkyl-amino-C₁₋₈alkyl, (C₁₋₈alkyl)₂-amino-C₁₋₈alkyl, amino-C₁₋₈alkyl-amino, C₁₋₈alkyl-amino-C₁₋₈alkyl-amino, (C₁₋₈alkyl-amino-C₁₋₈alkyl)₂-amino, (C₁₋₈alkyl)₂-amino-C₁₋₈alkyl-amino, [(C₁₋₈alkyl)₂-amino-C₁₋₈alkyl]₂-amino, (C₁₋₈alkyl-amino-C₁₋₈alkyl)(C₁₋₈alkyl)amino, [(C₁₋₈alkyl)₂-amino-C₁₋₈alkyl](C₁₋₈alkyl)amino, C₁₋₈alkoxy-C₁₋₈alkyl-amino, (C₁₋₈alkoxy-C₁₋₈alkyl)₂-amino, (C₁₋₈alkoxy-C₁₋₈alkyl)(C₁₋₈alkyl)amino, C₁₋₈alkyl-carbonyl-amino, C₁₋₈alkoxy-carbonyl-amino, hydroxy-C₁₋₈alkyl, hydroxy-C₁₋₈alkoxy-C₁₋₈alkyl, hydroxy-C₁₋₈alkyl-amino, (hydroxy-C₁₋₈alkyl)₂-amino or (hydroxy-C₁₋₈alkyl)(C₁₋₈alkyl)amino;
[0318] R₄ is C₃₋₁₄cycloalkyl, C₃₋₁₄cycloalkyl-C₁₋₈alkyl, C₃₋₁₄cycloalkyl-amino, aryl-C₁₋₈alkyl, aryl-C₁₋₈alkoxy-carbonyl, aryl-sulfonyloxy-C₁₋₈alkyl, heterocyclyl or heterocyclyl-C₁₋₈alkyl; wherein, each instance of C₃₋₁₄cycloalkyl, aryl and heterocyclyl is optionally substituted with one, two or three R₅ substituents;
[0319] R₅ is, in each instance, independently selected from halogen, hydroxy, cyano, nitro, C₁₋₈alkyl, halo-C₁₋₈alkyl, C₁₋₈alkoxy, halo-C₁₋₈alkoxy, amino, C₁₋₈alkyl-amino, (C₁₋₈alkyl)₂-amino or C₁₋₈alkyl-thio;
[0320] R₆ is, in each instance, independently selected from halogen, hydroxy, cyano, nitro, C₁₋₈alkyl, C₂₋₈alkenyl, halo-C₁₋₈alkyl, hydroxy-C₁₋₈alkyl, C₁₋₈alkoxy, halo-C₁₋₈alkoxy, C₁₋₈alkoxy-C₁₋₈alkyl, amino, C₁₋₈alkyl-amino, (C₁₋₈alkyl)₂-amino or C₁₋₈alkyl-thio; and,
[0321] R₇ is C₃₋₁₄cycloalkyl, C₃₋₁₄cycloalkyl-oxy, aryl, heterocyclyl or heteroaryl.

[0322] In certain embodiments, the iREMS comprises a DNA sequence GAgtrngn (SEQ ID NO: 4), wherein r is adenine or guanine and n is any nucleotide. In certain embodiments, n is adenine or guanine. In certain embodiments, the iREMS comprises a DNA sequence NNGAgtrngn (SEQ ID NO: 3), wherein r is adenine or guanine and n or N is any nucleotide. In a specific embodiment, the DNA sequence NNGAgtrngn (SEQ ID NO: 3) is selected from the group consisting of ANGAgtrngn (SEQ ID NO: 1829), CNGAgtrngn (SEQ ID NO: 1835), GNGAgtrngn (SEQ ID NO: 1841), TNGAgtrngn (SEQ ID NO: 1847), NAGAgtrngn (SEQ ID NO: 1830), NCGAgtrngn (SEQ ID NO: 1836), NGGAgtrngn (SEQ ID NO: 1842), NTGAgtrngn (SEQ ID NO: 1848), AAGAgtrngn (SEQ ID NO: 1831), ACGAgtrngn (SEQ ID NO: 1837), AGGAgtrngn (SEQ ID NO: 1843), ATGAgtrngn (SEQ ID NO: 1849), CAGAgtrngn (SEQ ID NO: 1832), CCGAgtrngn (SEQ ID NO: 1838), CGGAgtrngn (SEQ ID NO: 1844), CTGAgtrngn (SEQ ID NO: 1850), GAGAgtrngn (SEQ ID NO: 1833), GCGAgtrngn (SEQ ID NO: 1839), GGGAgtrngn (SEQ ID NO: 1845), GTGAgtrngn (SEQ ID NO: 1851), TAGAgtrngn (SEQ ID NO: 1834), TCGAgtrngn (SEQ ID NO: 1840), TGGAgtrngn (SEQ ID NO: 1846) and TTGAgtrngn (SEQ ID NO: 1852). In certain embodiments, n is adenine or guanine.

[0323] In certain embodiments, the iREMS comprises a DNA sequence NNGAgtragt (SEQ ID NO: 3864), wherein r is adenine or guanine and N is any nucleotide. In a specific embodiment, the DNA sequence NNGAgtragt (SEQ ID NO: 3864) is selected from the group consisting of ANGAgtragt (SEQ ID NO: 2237), CNGAgtragt (SEQ ID NO: 2243), GNGAgtragt (SEQ ID NO: 2249), TNGAgtragt (SEQ ID NO: 2255), NAGAgtragt (SEQ ID NO: 2238), NCGAgtragt (SEQ ID NO: 2244), NGGAgtragt (SEQ ID NO: 2250), NTGAgtragt (SEQ ID NO: 2256), AAGAgtragt (SEQ ID NO: 2239), ACGAgtragt (SEQ ID NO: 2245), AGGAgtragt (SEQ ID NO: 2251), ATGAgtragt (SEQ ID NO: 2257), CAGAgtragt (SEQ ID NO: 2240), CCGAgtragt (SEQ ID NO: 2246), CGGAgtragt (SEQ ID NO: 2252), CTGAgtragt (SEQ ID NO: 2258), GAGAgtragt (SEQ ID NO: 2241), GCGAgtragt (SEQ ID NO: 2247), GGGAgtragt (SEQ ID NO: 2253), GTGAgtragt (SEQ ID NO: 2259), TAGAgtragt (SEQ ID NO: 2242), TCGAgtragt (SEQ ID NO: 2248), TGGAgtragt (SEQ ID NO: 2254) and TTGAgtragt (SEQ ID NO: 2260), wherein r is adenine or guanine, and N is any nucleotide. In a specific embodiment, the iREMS comprises a DNA sequence presented in Table 14. In certain embodiments, n is adenine or guanine. In certain embodiments of the aspects and embodiments described herein, n is adenine or guanine.

[0324] In certain embodiments of a method for modulating the amount of an RNA transcript described herein, modulation of the amount of the RNA transcript is modulation of the amount of the RNA transcript in a cell or a lysate of the cell, the method comprising contacting the compound of Formula (I) or a form thereof with the cell or the cell lysate. In a specific embodiment of a method for modulating the amount of an RNA transcript described herein, modulation of the amount of the RNA transcript is modulation of the amount of the RNA transcript in a cell, the method comprising contacting the compound of Formula (I) or a form thereof with the cell. In certain embodiments of a method of modulating the amount of an RNA transcript described herein, the modulation modulates the amount and/or type of a protein translated from the RNA transcript and produced in the cell or lysate of the cell.

[0325] In certain embodiments of a method for modulating the amount of an RNA transcript described herein, modulation of the amount of the RNA transcript is modulation of the amount of the RNA transcript in a subject, the method comprising administering the compound of Formula (I) or a form thereof to the subject. In certain embodiments of a method for modulating the amount of an RNA transcript described herein, the modulation modulates the amount and/or type of a protein translated from the RNA transcript and produced in the subject. In a specific embodiment, the subject is a non-human subject. In another specific embodiment, the subject is a human subject.

[0326] In certain embodiments, the RNA transcript encodes a detectable reporter protein.

[0327] In another aspect, provided herein is an artificial gene construct comprising an RNA sequence comprising exons and one or more introns, wherein at least one intron comprises an iREMS that is downstream of a branch point and a 3′ splice site and wherein the iREMS comprises the sequence GAgurngn (SEQ ID NO: 2), wherein r is adenine or guanine and n is any nucleotide. In certain embodiments, n is adenine or guanine. In certain embodiments, one, two, or all of the iREMS, the branch point, and the 3′ splice site are non-endogenous. In certain embodiments, one, two, or all of the iREMS, the branch point, and the 3′ splice site are endogenous.

[0328] In another aspect, provided herein is an artificial gene construct comprising a DNA sequence encoding exons and one or more introns, wherein the nucleotide sequence encoding at least one intron comprises an iREMS that is downstream of the nucleotide sequence encoding a branch point and the nucleotide sequence encoding a 3′ splice site, and wherein the iREMS comprises the sequence GAgtrngn (SEQ ID NO: 4), wherein r is adenine or guanine and n is any nucleotide. In certain embodiments, n is adenine or guanine. In certain embodiments, one, two, or all of the iREMS, the branch point, and the 3′ splice site are non-endogenous. In certain embodiments, one, two, or all of the IREMS, the branch point, and the 3′ splice site are endogenous.

[0329] In another aspect, provided herein is a cell comprising an RNA sequence comprising exons and one or more introns, wherein at least one intron comprises an iREMS that is downstream of a branch point and a 3′ splice site and wherein the iREMS comprises the sequence GAgurngn (SEQ ID NO: 2), wherein r is adenine or guanine and n is any nucleotide. In certain embodiments, n is adenine or guanine. In certain embodiments, one, two, or all of the iREMS, the branch point, and the 3′ splice site are non-endogenous. In certain embodiments, one, two, or all of the iREMS, the branch point, and the 3′ splice site are endogenous.

[0330] In another aspect, provided herein is a cell comprising a DNA sequence encoding exons and one or more introns, wherein the nucleotide sequence encoding at least one intron comprises an iREMS that is downstream of the nucleotide sequence encoding a branch point and the nucleotide sequence encoding a 3′ splice site, and wherein the iREMS comprises the sequence GAgtrngn (SEQ ID NO: 4), wherein r is adenine or guanine and n is any nucleotide. In certain embodiments, one, two, or all of the iREMS, the branch point, and the 3′ splice site are non-endogenous. In certain embodiments, one, two, or all of the iREMS, the branch point, and the 3′ splice site are endogenous.

[0331] In another aspect, provided herein is a cell comprising an artificial gene construct described herein.

[0332] In another aspect, provided herein is a cell comprising a vector comprising an artificial gene construct described herein.

[0333] In another aspect, provided herein is a method for modulating the amount of an RNA transcript comprising a RNA nucleotide sequence comprising in 5′ to 3′ order: a branch point, a 3′ splice site, and an endogenous intronic recognition element for splicing modifier (iREMS), wherein the iREMS comprises an RNA sequence GAgurngn (SEQ ID NO: 2), wherein r is adenine or guanine and n is any nucleotide, and wherein the RNA transcript is an RNA transcript of a gene that is selected from ABCA10, ABCB8, ABCC3, ACTA2, ADAL, ADAMTS1, ADCY3, ADD1, ADGRG6, ADH6, ADHFE1, AFF3, AGPAT4, AKAP3, ANK1, ANK3, ANKRA2, ANKRD33B, ANKRD36, AP4B1-AS1, APIP, ARHGAP1, ARHGAP12, ARHGEF16, ARID5B, ARL15, ARL9, ARMCX6, ASIC1, ATG5, ATP2A3, ATXN1, B3GALT2, B3GNT6, BCL2L15, BCYRN1, BECN1, BHMT2, BIN3-IT1, BIRC3, BIRC6, BTG2, BTN3A1, C10orf54, C11orf70, C11orf94, C12orf4, C12orf56, C14orf132, C19orf47, C1orf86, C3, C7orf31, C8orf34, C8orf44, C8orf44-SGK3, C8orf88, CA13, CA3, CACNA2D2, CACNB1, CADM1, CAND2, CASP7, CCDC122, CCDC79, CCER2, CCNF, CECR7, CELSR1, CEMIP, CENPI, CEP112, CEP170, CEP192, CFH, CHEK1, CIITA, CLDN23, CLTA, CMAHP, CNGA4, CNRIP1, CNTD1, COL11A1, COL14A1, COL15A1, COL5A1, COL5A3, COL6A6, COL8A1, COLEC12, COMP, CPA4, CPQ, CPSF4, CRISPLD2, CRLF1, CRYBG3, CRYL1, CSNK1E, CSNK1G1, CYB5R2, CYGB, CYP1B1, DAGLB, DCAF17, DCLK1, DCN, DDIT4L, DDX50, DEGS1, DEPTOR, DFNB59, DIRAS3, DLG5, DLGAP4, DNAH8, DNAJC13, DNAJC27, DNMBP, DOCK11, DYNC1I1, DYRK1A, DZIP1L, EFEMP1, EGR3, ELN, ELP4, EMX2OS, ENAH, ENPP1, EP300, ERCC1, ERCC8, ERGIC3, ERLIN2, ERRFI1, ESM1, EVC, EVC2, F2R, FAIM, FAM126A, FAM13A, FAM160A1, FAM162A, FAM174A, FAM20A, FAM46B, FAM65B, FAP, FARP1, FBLN2, FBN2, FBXL6, FCHO1, FGFR2, FGL2, FLT1, FRAS1, FSCN2, GAL3ST4, GALNT15, GATA6, GBGT1, GCNT1, GDF6, GGACT, GLCE, GNAQ, GPR183, GPR50, GPRC5A, GPRC5B, GRTP1, GUCA1B, GULP1, GXYLT1, HAPLN1, HAPLN2, HAS3, HAVCR2, HDAC5, HDX, HECTD2-AS1, HEPH, HEY1, HMGA2, HMGN3-AS1, HNMT, HOOK3, HPS1, HSPA1L, HTATIP2, IFT57, IGDCC4, IGF2R, IGFBP3, IL16, INA, INPP5K, INTU, IQCG, ITGA11, ITGA8, ITGB8, ITIH1, ITPKA, IVD, KAT6B, KCNS1, KCNS2, KDM6A, KDSR, KIAA1456, KIAA1462, KIAA1755, KIT, KLF17, KLRG1, KMT2D, KRT7, KRTAP1-1, KRTAP1-5, L3MBTL2, LAMB2P1, LETM2, LGI2, LGR4, LHX9, LINC00472, LINC00570, LINC00578, LINC00607, LINC00678, LINC00702, LINC00886, LINC00961, LINC01011, LINC01118, LINC01204, LMOD1, LOC400927, LRBA, LRP4, LRRC32, LRRC39, LRRC42, LSAMP, LUM, LYPD1, LYRM1, MAFB, MAMDC2, MAN2A1, MAN2C1, MAPK13, MASP1, MB, MB21D2, MC4R, MCM10, MED13L, MEGF6, MFN2, MIAT, MIR612, MLLT10, MMP10, MMP24, MN1, MOXD1, MRPL45, MRPL55, MRPS28, MRVI1, MSH4, MTERF3, MXRA5, MYCBP2, NA, NAALADL2, NAE1, NAGS, NDNF, NGF, NGFR, NHLH1, NLN, NOTCH3, NOTUM, NOVA2, NOX4, NRROS, OCLN, OLR1, OSBPL10, OXCT1, OXCT2, PAIP2B, PBLD, PDE1C, PDE5A, PDGFD, PDGFRB, PDS5B, PEAR1, PHACTR3, PIGN, PIK3CD, PIK3R1, PIKFYVE, PIM2, PITPNM3, PLEK2, PLEKHA1, PLEKHA6, PLEKHH2, PLSCR1, PNISR, PODN, POLN, POLR1A, POMT2, PPARG, PPIP5K2, PPM1E, PPP1R26, PPP3CA, PRKCA, PRKG1, PRPF31, PRPH2, PRRG4, PRUNE2, PSMD6-AS2, PTGIS, PTX3, PXK, RAB30, RAB38, RAB44, RAD9B, RAF1, RAPGEF1, RARS, RARS2, RBBP8, RBKS, RDX, RERE, RFX3-AS1, RGCC, ROR1, ROR2, RPA1, RPS10, RPS6KB2, SAMD4A, SCARNA9, SEC24A, SENP6, SERGEF, SGK3, SH3YL1, SHROOM3, SIGLEC10, SKA2, SLC12A2, SLC24A3, SLC35F3, SLC39A10, SLC44A2, SLC46A2, SLC4A11, SLC6A15, SLC7A11, SLC9A3, SLIT3, SMG1P3, SMTN, SNED1, SNX7, SORBS2, SORCS2, SOX7, SPATA18, SPATA5, SPDYA, SPEF2, SPIDR, SPRYD7, SRGAP1, SRRM1, STAC2, STAT4, STK32B, STRN4, STS, STXBP6, SULF1, SVEP1, SYNGR2, SYNPO, SYNPO2, SYNPO2L, TAGLN3, TANGO6, TASP1, TCF12, TCF4, TGFA, TGFB2, TGFB3, TGM2, THBS2, TIAM1, TMC3, TMEM102, TMEM119, TMEM134, TMEM189-UBE2V1, TMEM214, TMEM256-PLSCR3, TMEM50B, TNFAIP8L3, TNFRSF14, TNRC18P1, TNRC6A, TNXB, TP53AIP1, TPRG1, TRIM66, TRPC4, TSHZ2, TSPAN11, TSPAN18, TSPAN7, TSSK3, TTC7B, TUBE1, TXNIP, TYW5, URGCP, USP27X, UVRAG, VAV2, VIM-AS1, VPS41, VSTM2L, VWF, WDR27, WDR91, WISP1, WNK1, WNT10B, YDJC, ZBTB26, ZCCHC5, ZCCHC8, ZFP82, ZMIZ1-AS1, ZNF138, ZNF212, ZNF232, ZNF350, ZNF431, ZNF660, ZNF680, ZNF79, or ZNF837; the method comprising contacting the RNA transcript with a compound of Formula (I) or a form thereof, wherein Formula (I) is:

[chemical structure]

[0334] wherein:
[0335] w₁ and w₅ are independently C—Rₐ or N;
[0336] w₂ is C—R_{b} or N;
[0337] w₃, w₄ and w₇ are independently C—R₁, C—R₂, C—Rₐ or N;
[0338] w₆ is C—R₁, C—R₂, C—R_{c} or N;
[0339] wherein one of w₃, w₄, w₆ and w₇ is C—R₁ and one other of w₃, w₄, w₆ and w₇ is C—R₂, provided that,
[0340] when w₃ is C—R₁, then w₆ is C—R₂ and w₄ and w₇ are independently C—Rₐ or N; or,
[0341] when w₃ is C—R₂, then w₆ is C—R₁ and w₄ and w₇ are independently C—Rₐ or N; or,
[0342] when w₄ is C—R₁, then w₇ is C—R₂ and w₃ is C—Rₐ or N and w₆ is C—R_{c} or N; or,
[0343] when w₄ is C—R₂, then w₇ is C—R₁ and w₃ is C—Rₐ or N and w₆ is C—R_{c} or N; and,
[0344] wherein any one, two or three of w₁, w₂, w₃, w₄, w₅, w₆ and w₇ may optionally be N;
[0345] R₁ is C₁₋₈alkyl, amino, C₁₋₈alkyl-amino, (C₁₋₈alkyl)₂-amino, C₁₋₈alkoxy-C₁₋₈alkyl-amino, (C₁₋₈alkoxy-C₁₋₈alkyl)₂-amino, (C₁₋₈alkoxy-C₁₋₈alkyl)(C₁₋₈alkyl)amino, amino-C₁₋₈alkyl, C₁₋₈alkyl-amino-C₁₋₈alkyl, (C₁₋₈alkyl)₂-amino-C₁₋₈alkyl, C₁₋₈alkoxy-C₁₋₈alkyl-amino-C₁₋₈alkyl, (C₁₋₈alkoxy-C₁₋₈alkyl)₂-amino-C₁₋₈alkyl, (C₁₋₈alkoxy-C₁₋₈alkyl)(C₁₋₈alkyl)amino-C₁₋₈alkyl, amino-C₁₋₈alkyl-amino, (amino-C₁₋₈alkyl)₂-amino, (amino-C₁₋₈alkyl)(C₁₋₈alkyl)amino, C₁₋₈alkyl-amino-C₁₋₈alkyl-amino, (C₁₋₈alkyl-amino-C₁₋₈alkyl)₂-amino, (C₁₋₈alkyl-amino-C₁₋₈alkyl)(C₁₋₈alkyl)amino, (C₁₋₈alkyl)₂-amino-C₁₋₈alkyl-amino, [(C₁₋₈alkyl)₂-amino-C₁₋₈alkyl](C₁₋₈alkyl)amino, amino-C₁₋₈alkoxy, C₁₋₈alkyl-amino-C₁₋₈alkoxy, (C₁₋₈alkyl)₂-amino-C₁₋₈alkoxy, C₁₋₈alkoxy-C₁₋₈alkyl-amino-C₁₋₈alkoxy, C₁₋₈alkoxy-C₁₋₈alkyl-amino-C₁₋₈alkoxy, (C₁₋₈alkoxy-C₁₋₈alkyl)(C₁₋₈alkyl)amino-C₁₋₈alkoxy, amino-C₂₋₈alkenyl, C₁₋₈alkyl-amino-C₂₋₈alkenyl, (C₁₋₈alkyl)₂-amino-C₂₋₈alkenyl, amino-C₂₋₈alkynyl, C₁₋₈alkyl-amino-C₂₋₈alkynyl, (C₁₋₈alkyl)₂-amino-C₂₋₈alkynyl, halo-C₁₋₈alkyl-amino, (halo-C₁₋₈alkyl)₂-amino, (halo-C₁₋₈alkyl)(C₁₋₈alkyl)amino, hydroxy-C₁₋₈alkyl, hydroxy-C₁₋₈alkoxy-C₁₋₈alkyl, hydroxy-C₁₋₈alkyl-amino, (hydroxy-C₁₋₈alkyl)₂-amino, (hydroxy-C₁₋₈alkyl)(C₁₋₈alkyl)amino, hydroxy-C₁₋₈alkyl-amino-C₁₋₈alkyl, (hydroxy-C₁₋₈alkyl)₂-amino-C₁₋₈alkyl, (hydroxy-C₁₋₈alkyl)(C₁₋₈alkyl)amino-C₁₋₈alkyl, hydroxy-C₁₋₈alkyl-amino-C₁₋₈alkoxy, (hydroxy-C₁₋₈alkyl)₂-amino-C₁₋₈alkoxy, (hydroxy-C₁₋₈alkyl)(C₁₋₈alkyl)amino-C₁₋₈alkoxy, hydroxy-C₁₋₈alkyl-amino-C₁₋₈alkyl-amino, (hydroxy-C₁₋₈alkyl-amino-C₁₋₈alkyl)₂-amino, (hydroxy-C₁₋₈alkyl)₂-amino-C₁₋₈alkyl-amino, (hydroxy-C₁₋₈alkyl-amino-C₁₋₈alkyl)(C₁₋₈alkyl)amino, (hydroxy-C₁₋₈alkyl)(C₁₋₈alkyl)amino-C₁₋₈alkyl-amino, [(hydroxy-C₁₋₈alkyl)₂-amino-C₁₋₈alkyl](C₁₋₈alkyl)amino, [(hydroxy-C₁₋₈alkyl)(C₁₋₈alkyl)amino-C₁₋₈alkyl](C₁₋₈alkyl)amino, heterocyclyl, heterocyclyl-C₁₋₈alkyl, heterocyclyl-C₁₋₈alkoxy, heterocyclyl-amino, (heterocyclyl)(C₁₋₈alkyl)amino, heterocyclyl-amino-C₁₋₈alkyl, heterocyclyl-C₁₋₈alkyl-amino, (heterocyclyl-C₁₋₈alkyl)₂-amino, (heterocyclyl-C₁₋₈alkyl)(C₁₋₈alkyl)amino, heterocyclyl-C₁₋₈alkyl-amino-C₁₋₈alkyl, (heterocyclyl-C₁₋₈alkyl)₂-amino-C₁₋₈alkyl, (heterocyclyl-C₁₋₈alkyl)(C₁₋₈alkyl)amino-C₁₋₈alkyl, heterocyclyl-oxy, heterocyclyl-carbonyl, heterocyclyl-carbonyl-oxy, C₃₋₁₄cycloalkyl, aryl-C₁₋₈alkyl-amino, (aryl-C₁₋₈alkyl)₂-amino, (aryl-C₁₋₈alkyl)(C₁₋₈alkyl)amino, aryl-C₁₋₈alkyl-amino-C₁₋₈alkyl, (aryl-C₁₋₈alkyl)₂-amino-C₁₋₈alkyl, (aryl-C₁₋₈alkyl)(C₁₋₈alkyl)amino-C₁₋₈alkyl, heteroaryl, heteroaryl-C₁₋₈alkyl, heteroaryl-C₁₋₈alkoxy, heteroaryl-amino, heteroaryl-C₁₋₈alkyl-amino, (heteroaryl-C₁₋₈alkyl)₂-amino, (heteroaryl-C₁₋₈alkyl)(C₁₋₈alkyl)amino, heteroaryl-C₁₋₈alkyl-amino-C₁₋₈alkyl, (heteroaryl-C₁₋₈alkyl)₂-amino-C₁₋₈alkyl or (heteroaryl-C₁₋₈alkyl)(C₁₋₈alkyl)amino-C₁₋₈alkyl;
[0346] wherein, each instance of heterocyclyl, C₃₋₁₄cycloalkyl, aryl and heteroaryl is optionally substituted with one, two or three R₃ substituents and optionally, with one additional R₄ substituent; or,
[0347] wherein, each instance of heterocyclyl, C₃₋₁₄cycloalkyl, aryl and heteroaryl is optionally substituted with one, two, three or four R₃ substituents;
[0348] R₂ is aryl, aryl-amino, aryl-amino-carbonyl, heterocyclyl, heteroaryl or heteroaryl-amino;
[0349] wherein, each instance of aryl, heterocyclyl and heteroaryl is optionally substituted with one, two or three R₆ substituents and optionally, with one additional R₇ substituent;
[0350] Rₐ is, in each instance, independently selected from hydrogen, halogen, C₁₋₈alkyl or deuterium;
[0351] R_{b} is hydrogen, halogen, C₁₋₈alkyl, C₁₋₈alkoxy or deuterium;
[0352] R_{c} is hydrogen, halogen, C₁₋₈alkyl or deuterium;
[0353] R₃ is, in each instance, independently selected from cyano, halogen, hydroxy, oxo, C₁₋₈alkyl, halo-C₁₋₈alkyl, C₁₋₈alkyl-carbonyl, C₁₋₈alkoxy, halo-C₁₋₈alkoxy, C₁₋₈alkoxy-C₁₋₈alkyl, C₁₋₈alkoxy-carbonyl, amino, C₁₋₈alkyl-amino, (C₁₋₈alkyl)₂-amino, amino-C₁₋₈alkyl, C₁₋₈alkyl-amino-C₁₋₈alkyl, (C₁₋₈alkyl)₂-amino-C₁₋₈alkyl, amino-C₁₋₈alkyl-amino, C₁₋₈alkyl-amino-C₁₋₈alkyl-amino, (C₁₋₈alkyl-amino-C₁₋₈alkyl)₂-amino, (C₁₋₈alkyl)₂-amino-C₁₋₈alkyl-amino, [(C₁₋₈alkyl)₂-amino-C₁₋₈alkyl]₂-amino, (C₁₋₈alkyl-amino-C₁₋₈alkyl)(C₁₋₈alkyl)amino, [(C₁₋₈alkyl)₂-amino-C₁₋₈alkyl](C₁₋₈alkyl)amino, C₁₋₈alkoxy-C₁₋₈alkyl-amino, (C₁₋₈alkoxy-C₁₋₈alkyl)₂-amino, (C₁₋₈alkoxy-C₁₋₈alkyl)(C₁₋₈alkyl)amino, C₁₋₈alkyl-carbonyl-amino, C₁₋₈alkoxy-carbonyl-amino, hydroxy-C₁₋₈alkyl, hydroxy-C₁₋₈alkoxy-C₁₋₈alkyl, hydroxy-C₁₋₈alkyl-amino, (hydroxy-C₁₋₈alkyl)₂-amino or (hydroxy-C₁₋₈alkyl)(C₁₋₈alkyl)amino;
[0354] R₄ is C₃₋₁₄cycloalkyl, C₃₋₁₄cycloalkyl-C₁₋₈alkyl, C₃₋₁₄cycloalkyl-amino, aryl-C₁₋₈alkyl, aryl-C₁₋₈alkoxy-carbonyl, aryl-sulfonyloxy-C₁₋₈alkyl, heterocyclyl or heterocyclyl-C₁₋₈alkyl; wherein, each instance of C₃₋₁₄cycloalkyl, aryl and heterocyclyl is optionally substituted with one, two or three R₅ substituents;
[0355] R₅ is, in each instance, independently selected from halogen, hydroxy, cyano, nitro, C₁₋₈alkyl, halo-C₁₋₈alkyl, C₁₋₈alkoxy, halo-C₁₋₈alkoxy, amino, C₁₋₈alkyl-amino, (C₁₋₈alkyl)₂-amino or C₁₋₈alkyl-thio;
[0356] R₆ is, in each instance, independently selected from halogen, hydroxy, cyano, nitro, C₁₋₈alkyl, C₂₋₈alkenyl, halo-C₁₋₈alkyl, hydroxy-C₁₋₈alkyl, C₁₋₈alkoxy, halo-C₁₋₈alkoxy, C₁₋₈alkoxy-C₁₋₈alkyl, amino, C₁₋₈alkyl-amino, (C₁₋₈alkyl)₂-amino or C₁₋₈alkyl-thio; and,
[0357] R₇ is C₃₋₁₄cycloalkyl, C₃₋₁₄cycloalkyl-oxy, aryl, heterocyclyl or heteroaryl.

[0358] In another aspect provided herein is a method for modulating the amount of an RNA transcript comprising a RNA nucleotide sequence comprising in 5′ to 3′ order: a branch point, a 3′ splice site and an endogenous or non-endogenous intronic recognition element for splicing modifier (iREMS); wherein the iREMS comprises an RNA sequence GAgurngn (SEQ ID NO: 2), wherein r is adenine or guanine and n is any nucleotide, the method comprising contacting the RNA transcript with a compound of Formula (I) or a form thereof, wherein Formula (I) is:

[chemical structure]

[0359] wherein:
[0360] w₁ and w₅ are independently C—Rₐ or N;
[0361] w₂ is C—R_{b} or N;
[0362] w₃, w₄ and w₇ are independently C—R₁, C—R₂, C—Rₐ or N;
[0363] w₆ is C—R₁, C—R₂, C—R_{c} or N;
[0364] wherein one of w₃, w₄, w₆ and w₇ is C—R₁ and one other of w₃, w₄, w₆ and w₇ is C—R₂, provided that,
[0365] when w₃ is C—R₁, then w₆ is C—R₂ and w₄ and w₇ are independently C—Rₐ or N; or,
[0366] when w₃ is C—R₂, then w₆ is C—R₁ and w₄ and w₇ are independently C—Rₐ or N; or,
[0367] when w₄ is C—R₁, then w₇ is C—R₂ and w₃ is C—Rₐ or N and w₆ is C—R_{c} or N; or,
[0368] when w₄ is C—R₂, then w₇ is C—R₁ and w₃ is C—Rₐ or N and w₆ is C—R_{c} or N; and,
[0369] wherein any one, two or three of w₁, w₂, w₃, w₄, w₅, w₆ and w₇ may optionally be N;
[0370] R₁ is C₁₋₈alkyl, amino, C₁₋₈alkyl-amino, (C₁₋₈alkyl)₂-amino, C₁₋₈alkoxy-C₁₋₈alkyl-amino, (C₁₋₈alkoxy-C₁₋₈alkyl)₂-amino, (C₁₋₈alkoxy-C₁₋₈alkyl)(C₁₋₈alkyl)amino, amino-C₁₋₈alkyl, C₁₋₈alkyl-amino-C₁₋₈alkyl, (C₁₋₈alkyl)₂-amino-C₁₋₈alkyl, C₁₋₈alkoxy-C₁₋₈alkyl-amino-C₁₋₈alkyl, (C₁₋₈alkoxy-C₁₋₈alkyl)₂-amino-C₁₋₈alkyl, (C₁₋₈alkoxy-C₁₋₈alkyl)(C₁₋₈alkyl)amino-C₁₋₈alkyl, amino-C₁₋₈alkyl-amino, (amino-C₁₋₈alkyl)₂-amino, (amino-C₁₋₈alkyl)(C₁₋₈alkyl)amino, C₁₋₈alkyl-amino-C₁₋₈alkyl-amino, (C₁₋₈alkyl-amino-C₁₋₈alkyl)₂-amino, (C₁₋₈alkyl-amino-C₁₋₈alkyl)(C₁₋₈alkyl)amino, (C₁₋₈alkyl)₂-amino-C₁₋₈alkyl-amino, [(C₁₋₈alkyl)₂-amino-C₁₋₈alkyl](C₁₋₈alkyl)amino, amino-C₁₋₈alkoxy, C₁₋₈alkyl-amino-C₁₋₈alkoxy, (C₁₋₈alkyl)₂-amino-C₁₋₈alkoxy, C₁₋₈alkoxy-C₁₋₈alkyl-amino-C₁₋₈alkoxy, C₁₋₈alkoxy-C₁₋₈alkyl-amino-C₁₋₈alkoxy, (C₁₋₈alkoxy-C₁₋₈alkyl)(C₁₋₈alkyl)amino-C₁₋₈alkoxy, amino-C₂₋₈alkenyl, C₁₋₈alkyl-amino-C₂₋₈alkenyl, (C₁₋₈alkyl)₂-amino-C₂₋₈alkenyl, amino-C₂₋₈alkynyl, C₁₋₈alkyl-amino-C₂₋₈alkynyl, (C₁₋₈alkyl)₂-amino-C₂₋₈alkynyl, halo-C₁₋₈alkyl-amino, (halo-C₁₋₈alkyl)₂-amino, (halo-C₁₋₈alkyl)(C₁₋₈alkyl)amino, hydroxy-C₁₋₈alkyl, hydroxy-C₁₋₈alkoxy-C₁₋₈alkyl, hydroxy-C₁₋₈alkyl-amino, (hydroxy-C₁₋₈alkyl)₂-amino, (hydroxy-C₁₋₈alkyl)(C₁₋₈alkyl)amino, hydroxy-C₁₋₈alkyl-amino-C₁₋₈alkyl, (hydroxy-C₁₋₈alkyl)₂-amino-C₁₋₈alkyl, (hydroxy-C₁₋₈alkyl)(C₁₋₈alkyl)amino-C₁₋₈alkyl, hydroxy-C₁₋₈alkyl-amino-C₁₋₈alkoxy, (hydroxy-C₁₋₈alkyl)₂-amino-C₁₋₈alkoxy, (hydroxy-C₁₋₈alkyl)(C₁₋₈alkyl)amino-C₁₋₈alkoxy, hydroxy-C₁₋₈alkyl-amino-C₁₋₈alkyl-amino, (hydroxy-C₁₋₈alkyl-amino-C₁₋₈alkyl)₂-amino, (hydroxy-C₁₋₈alkyl)₂-amino-C₁₋₈alkyl-amino, (hydroxy-C₁₋₈alkyl-amino-C₁₋₈alkyl)(C₁₋₈alkyl)amino, (hydroxy-C₁₋₈alkyl)(C₁₋₈alkyl)amino-C₁₋₈alkyl-amino, [(hydroxy-C₁₋₈alkyl)₂-amino-C₁₋₈alkyl](C₁₋₈alkyl)amino, [(hydroxy-C₁₋₈alkyl)(C₁₋₈alkyl)amino-C₁₋₈alkyl](C₁₋₈alkyl)amino, heterocyclyl, heterocyclyl-C₁₋₈alkyl, heterocyclyl-C₁₋₈alkoxy, heterocyclyl-amino, (heterocyclyl)(C₁₋₈alkyl)amino, heterocyclyl-amino-C₁₋₈alkyl, heterocyclyl-C₁₋₈alkyl-amino, (heterocyclyl-C₁₋₈alkyl)₂-amino, (heterocyclyl-C₁₋₈alkyl)(C₁₋₈alkyl)amino, heterocyclyl-C₁₋₈alkyl-amino-C₁₋₈alkyl, (heterocyclyl-C₁₋₈alkyl)₂-amino-C₁₋₈alkyl, (heterocyclyl-C₁₋₈alkyl)(C₁₋₈alkyl)amino-C₁₋₈alkyl, heterocyclyl-oxy, heterocyclyl-carbonyl, heterocyclyl-carbonyl-oxy, C₃₋₁₄cycloalkyl, aryl-C₁₋₈alkyl-amino, (aryl-C₁₋₈alkyl)₂-amino, (aryl-C₁₋₈alkyl)(C₁₋₈alkyl)amino, aryl-C₁₋₈alkyl-amino-C₁₋₈alkyl, (aryl-C₁₋₈alkyl)₂-amino-C₁₋₈alkyl, (aryl-C₁₋₈alkyl)(C₁₋₈alkyl)amino-C₁₋₈alkyl, heteroaryl, heteroaryl-C₁₋₈alkyl, heteroaryl-C₁₋₈alkoxy, heteroaryl-amino, heteroaryl-C₁₋₈alkyl-amino, (heteroaryl-C₁₋₈alkyl)₂-amino, (heteroaryl-C₁₋₈alkyl)(C₁₋₈alkyl)amino, heteroaryl-C₁₋₈alkyl-amino-C₁₋₈alkyl, (heteroaryl-C₁₋₈alkyl)₂-amino-C₁₋₈alkyl or (heteroaryl-C₁₋₈alkyl)(C₁₋₈alkyl)amino-C₁₋₈alkyl;
[0371] wherein, each instance of heterocyclyl, C₃₋₁₄cycloalkyl, aryl and heteroaryl is optionally substituted with one, two or three R₃ substituents and optionally, with one additional R₄ substituent; or,
[0372] wherein, each instance of heterocyclyl, C₃₋₁₄cycloalkyl, aryl and heteroaryl is optionally substituted with one, two, three or four R₃ substituents;
[0373] R₂ is aryl, aryl-amino, aryl-amino-carbonyl, heterocyclyl, heteroaryl or heteroaryl-amino;
[0374] wherein, each instance of aryl, heterocyclyl and heteroaryl is optionally substituted with one, two or three R₆ substituents and optionally, with one additional R₇ substituent;
[0375] Rₐ is, in each instance, independently selected from hydrogen, halogen, C₁₋₈alkyl or deuterium;
[0376] R_{b} is hydrogen, halogen, C₁₋₈alkyl, C₁₋₈alkoxy or deuterium;
[0377] R_{c} is hydrogen, halogen, C₁₋₈alkyl or deuterium;
[0378] R₃ is, in each instance, independently selected from cyano, halogen, hydroxy, oxo, C₁₋₈alkyl, halo-C₁₋₈alkyl, C₁₋₈alkyl-carbonyl, C₁₋₈alkoxy, halo-C₁₋₈alkoxy, C₁₋₈alkoxy-C₁₋₈alkyl, C₁₋₈alkoxy-carbonyl, amino, C₁₋₈alkyl-amino, (C₁₋₈alkyl)₂-amino, amino-C₁₋₈alkyl, C₁₋₈alkyl-amino-C₁₋₈alkyl, (C₁₋₈alkyl)₂-amino-C₁₋₈alkyl, amino-C₁₋₈alkyl-amino, C₁₋₈alkyl-amino-C₁₋₈alkyl-amino, (C₁₋₈alkyl-amino-C₁₋₈alkyl)₂-amino, (C₁₋₈alkyl)₂-amino-C₁₋₈alkyl-amino, [(C₁₋₈alkyl)₂-amino-C₁₋₈alkyl]₂-amino, (C₁₋₈alkyl-amino-C₁₋₈alkyl)C₁₋₈alkyl)amino, [(C₁₋₈alkyl)₂-amino-C₁₋₈alkyl](C₁₋₈alkyl)amino, C₁₋₈alkoxy-C₁₋₈alkyl-amino, (C₁₋₈alkoxy-C₁₋₈alkyl)₂-amino, (C₁₋₈alkoxy-C₁₋₈alkyl)(C₁₋₈alkyl)amino, C₁₋₈alkyl-carbonyl-amino, C₁₋₈alkoxy-carbonyl-amino, hydroxy-C₁₋₈alkyl, hydroxy-C₁₋₈alkoxy-C₁₋₈alkyl, hydroxy-C₁₋₈alkyl-amino, (hydroxy-C₁₋₈alkyl)₂-amino or (hydroxy-C₁₋₈alkyl)(C₁₋₈alkyl)amino;
[0379] R₄ is C₃₋₁₄cycloalkyl, C₃₋₁₄cycloalkyl-C₁₋₈alkyl, C₃₋₁₄cycloalkyl-amino, aryl-C₁₋₈alkyl, aryl-C₁₋₈alkoxy-carbonyl, aryl-sulfonyloxy-C₁₋₈alkyl, heterocyclyl or heterocyclyl-C₁₋₈alkyl; wherein, each instance of C₃₋₁₄cycloalkyl, aryl and heterocyclyl is optionally substituted with one, two or three R₅ substituents;
[0380] R₅ is, in each instance, independently selected from halogen, hydroxy, cyano, nitro, C₁₋₈alkyl, halo-C₁₋₈alkyl, C₁₋₈alkoxy, halo-C₁₋₈alkoxy, amino, C₁₋₈alkyl-amino, (C₁₋₈alkyl)₂-amino or C₁₋₈alkyl-thio;
[0381] R₆ is, in each instance, independently selected from halogen, hydroxy, cyano, nitro, C₁₋₈alkyl, C₂₋₈alkenyl, halo-C₁₋₈alkyl, hydroxy-C₁₋₈alkyl, C₁₋₈alkoxy, halo-C₁₋₈alkoxy, C₁₋₈alkoxy-C₁₋₈alkyl, amino, C₁₋₈alkyl-amino, (C₁₋₈alkyl)₂-amino or C₁₋₈alkyl-thio; and,
[0382] R₇ is C₃₋₁₄cycloalkyl, C₃₋₁₄cycloalkyl-oxy, aryl, heterocyclyl or heteroaryl.

[0383] In certain embodiments, the RNA transcript is an RNA transcript of a gene that is selected from ABCB8, ABCC3, ADAM17, ADCY3, AGPAT4, ANKRA2, ANXA11, APIP, APLP2, APPL2, ARHGAP1, ARL15, ASAP1, ASPH, ATAD2B, ATXN1, AXIN1, BECN1, BHMT2, BICD1, BTN3A1, C11orf30, C11orf73, C12orf4, C14orf132, C8orf44, C8orf44-SGK3, C8orf88, CASC3, CASP7, CCDC122, CDH13, CECR7, CENPI, CEP112, CEP192, CHEK1, CMAHP, CNRIP1, COPS7B, CPSF4, CRISPLD2, CRYBG3, CSNK1E, CSNK1G1, DAGLB, DCAF17, DCUN1D4, DDX42, DENND1A, DENND5A, DGKA, DHFR, DTAPH3, DLGAP4, DNAJC13, DNMBP, DOCK1, DYRK1A, EIF2B3, ENAH, ENOX1, EP300, ERC1, ERCC1, ERGIC3, ERLIN2, ERRFI1, EVC, FAF1, FAIM, FAM126A, FAM13A, FAM162A, FAM174A, FAM198B, FBN2, FER, FHOD3, FOCAD, GALC, GCFC2, GGACT, GGCT, GLCE, GOLGA4, GOLGB1, GPSM2, GULP1, GXYLT1, HAT1, HDX, HLTF, HMGA2, HNMT, HPS1, HSD17B12, HSD17B4, HTT, IFT57, INPP5K, TVD, KDM6A, KTAA1524, KIAA1715, LETM2, LOC400927, LRRC42, LUC7L3, LYRM1, MADD, MB21D2, MCM10, MED13L, MEDAG, MEMO1, MFN2, MMS19, MRPL45, MRPS28, MTERF3, MYCBP2, MYLK, MYOF, NGF, NREP, NSUN4, NT5C2, OSMR, OXCT1, PAPD4, PCM1, PDE7A, PDS5B, PDXDC1, PIGN, PIK3CD, PIK3R1, PIKFYVE, PITPNB, PLEKHA1, PLSCR1, PMS1, POMT2, PPARG, PPHLN1, PPIP5K2, PPP1R26, PRPF31, PRSS23, PRUNE2, PSMA4, PXK, RAF1, RAPlA, RAPGEF1, RARS2, RBKS, RERE, RFWD2, RNFT1, RPA1, RPS10, RPS6KB2, SAMD4A, SAR1A, SCO1, SEC24A, SENP6, SERGEF, SGK3, SH3YL1, SKA2, SLC12A2, SLC25A17, SLC44A2, SMYD3, SNAP23, SNHG16, SNX7, SOS2, SPATA18, SPATA5, SPIDR, SPRYD7, SRGAP1, SRRM1, STAT1, STRN3, STXBP6, SUPT20H, TAF2, TASP1, TBC1D15, TCF12, TCF4, TIAM1, TJP2, TMC3, TMEM189-UBE2V1, TMEM214, TNRC6A, TNS3, TOE1, TRAF3, TRIM65, TSPAN2, TTC7B, TUBE1, TYW5, UBAP2L, UBE2V1, URGCP, VAV2, VPS29, WDR27, WDR37, WDR91, WNK1, XRN2, ZCCHC8, ZFP82, ZNF138, ZNF232, ZNF37BP or ZNF680.

[0384] In another aspect, provided herein is a method for modulating the amount of an RNA transcript comprising a RNA nucleotide sequence, wherein the RNA nucleotide sequence comprises two exons and an intron, wherein one exon is upstream of the intron and the other exon is downstream of the intron, wherein the RNA nucleotide sequence of the intron comprises in 5′ to 3′ order: a first 5′ splice site, a first branch point, a first 3′ splice site, an iREMS, a second branch point and a second 3′ splice site, wherein the iREMS comprises an RNA sequence GAgurngn (SEQ ID NO: 2), wherein r is adenine or guanine and n is any nucleotide, the method comprising contacting the RNA transcript with a compound of Formula (I) or a form thereof, wherein Formula (I) is:

[chemical structure]

[0385] wherein:
[0386] w₁ and w₅ are independently C—Rₐ or N;
[0387] w₂ is C—R_{b} or N;
[0388] w₃, w₄ and w₇ are independently C—R₁, C—R₂, C—Rₐ or N;
[0389] w₆ is C—R₁, C—R₂, C—R_{c} or N;
[0390] wherein one of w₃, w₄, w₆ and w₇ is C—R₁ and one other of w₃, w₄, w₆ and w₇ is C—R₂, provided that,
[0391] when w₃ is C—R₁, then w₆ is C—R₂ and w₄ and w₇ are independently C—Rₐ or N; or,
[0392] when w₃ is C—R₂, then w₆ is C—R₁ and w₄ and w₇ are independently C—Rₐ or N; or,
[0393] when w₄ is C—R₁, then w₇ is C—R₂ and w₃ is C—Rₐ or N and w₆ is C—R_{c} or N; or,
[0394] when w₄ is C—R₂, then w₇ is C—R₁ and w₃ is C—Rₐ or N and w₆ is C—R_{c} or N; and,
[0395] wherein any one, two or three of w₁, w₂, w₃, w₄, w₅, w₆ and w₇ may optionally be N;
[0396] R₁ is C₁₋₈alkyl, amino, C₁₋₈alkyl-amino, (C₁₋₈alkyl)₂-amino, C₁₋₈alkoxy-C₁₋₈alkyl-amino, (C₁₋₈alkoxy-C₁₋₈alkyl)₂-amino, (C₁₋₈alkoxy-C₁₋₈alkyl)(C₁₋₈alkyl)amino, amino-C₁₋₈alkyl, C₁₋₈alkyl-amino-C₁₋₈alkyl, (C₁₋₈alkyl)₂-amino-C₁₋₈alkyl, C₁₋₈alkoxy-C₁₋₈alkyl-amino-C₁₋₈alkyl, (C₁₋₈alkoxy-C₁₋₈alkyl)₂-amino-C₁₋₈alkyl, (C₁₋₈alkoxy-C₁₋₈alkyl)(C₁₋₈alkyl)amino-C₁₋₈alkyl, amino-C₁₋₈alkyl-amino, (amino-C₁₋₈alkyl)₂-amino, (amino-C₁₋₈alkyl)(C₁₋₈alkyl)amino, C₁₋₈alkyl-amino-C₁₋₈alkyl-amino, (C₁₋₈alkyl-amino-C₁₋₈alkyl)₂-amino, (C₁₋₈alkyl-amino-C₁₋₈alkyl)(C₁₋₈alkyl)amino, (C₁₋₈alkyl)₂-amino-C₁₋₈alkyl-amino, [(C₁₋₈alkyl)₂-amino-C₁₋₈alkyl](C₁₋₈alkyl)amino, amino-C₁₋₈alkoxy, C₁₋₈alkyl-amino-C₁₋₈alkoxy, (C₁₋₈alkyl)₂-amino-C₁₋₈alkoxy, C₁₋₈alkoxy-C₁₋₈alkyl-amino-C₁₋₈alkoxy, C₁₋₈alkoxy-C₁₋₈alkyl-amino-C₁₋₈alkoxy, (C₁₋₈alkoxy-C₁₋₈alkyl)(C₁₋₈alkyl)amino-C₁₋₈alkoxy, amino-C₂₋₈alkenyl, C₁₋₈alkyl-amino-C₂₋₈alkenyl, (C₁₋₈alkyl)₂-amino-C₂₋₄alkenyl, amino-C₂₋₈alkynyl, C₁₋₈alkyl-amino-C₂₋₈alkynyl, (C₁₋₈alkyl)₂-amino-C₂₋₈alkynyl, halo-C₁₋₈alkyl-amino, (halo-C₁₋₈alkyl)₂-amino, (halo-C₁₋₈alkyl)(C₁₋₈alkyl)amino, hydroxy-C₁₋₈alkyl, hydroxy-C₁₋₈alkoxy-C₁₋₈alkyl, hydroxy-C₁₋₈alkyl-amino, (hydroxy-C₁₋₈alkyl)₂-amino, (hydroxy-C₁₋₈alkyl)(C₁₋₈alkyl)amino, hydroxy-C₁₋₈alkyl-amino-C₁₋₈alkyl, (hydroxy-C₁₋₈alkyl)₂-amino-C₁₋₈alkyl, (hydroxy-C₁₋₈alkyl)(C₁₋₈alkyl)amino-C₁₋₈alkyl, hydroxy-C₁₋₈alkyl-amino-C₁₋₈alkoxy, (hydroxy-C₁₋₈alkyl)₂-amino-C₁₋₈alkoxy, (hydroxy-C₁₋₈alkyl)(C₁₋₈alkyl)amino-C₁₋₈alkoxy, hydroxy-C₁₋₈alkyl-amino-C₁₋₈alkyl-amino, (hydroxy-C₁₋₈alkyl-amino-C₁₋₈alkyl)₂-amino, (hydroxy-C₁₋₈alkyl)₂-amino-C₁₋₈alkyl-amino, (hydroxy-C₁₋₈alkyl-amino-C₁₋₈alkyl)(C₁₋₈alkyl)amino, (hydroxy-C₁₋₈alkyl)(C₁₋₈alkyl)amino-C₁₋₈alkyl-amino, [(hydroxy-C₁₋₈alkyl)₂-amino-C₁₋₈alkyl](C₁₋₈alkyl)amino, [(hydroxy-C₁₋₈alkyl)(C₁₋₈alkyl)amino-C₁₋₈alkyl](C₁₋₈alkyl)amino, heterocyclyl, heterocyclyl-C₁₋₈alkyl, heterocyclyl-C₁₋₈alkoxy, heterocyclyl-amino, (heterocyclyl)(C₁₋₈alkyl)amino, heterocyclyl-amino-C₁₋₈alkyl, heterocyclyl-C₁₋₈alkyl-amino, (heterocyclyl-C₁₋₈alkyl)₂-amino, (heterocyclyl-C₁₋₈alkyl)(C₁₋₈alkyl)amino, heterocyclyl-C₁₋₈alkyl-amino-C₁₋₈alkyl, (heterocyclyl-C₁₋₈alkyl)₂-amino-C₁₋₈alkyl, (heterocyclyl-C₁₋₈alkyl)(C₁₋₈alkyl)amino-C₁₋₈alkyl, heterocyclyl-oxy, heterocyclyl-carbonyl, heterocyclyl-carbonyl-oxy, C₃₋₁₄cycloalkyl, aryl-C₁₋₈alkyl-amino, (aryl-C₁₋₈alkyl)₂-amino, (aryl-C₁₋₈alkyl)(C₁₋₈alkyl)amino, aryl-C₁₋₈alkyl-amino-C₁₋₈alkyl, (aryl-C₁₋₈alkyl)₂-amino-C₁₋₈alkyl, (aryl-C₁₋₈alkyl)(C₁₋₈alkyl)amino-C₁₋₈alkyl, heteroaryl, heteroaryl-C₁₋₈alkyl, heteroaryl-C₁₋₈alkoxy, heteroaryl-amino, heteroaryl-C₁₋₈alkyl-amino, (heteroaryl-C₁₋₈alkyl)₂-amino, (heteroaryl-C₁₋₈alkyl)(C₁₋₈alkyl)amino, heteroaryl-C₁₋₈alkyl-amino-C₁₋₈alkyl, (heteroaryl-C₁₋₈alkyl)₂-amino-C₁₋₈alkyl or (heteroaryl-C₁₋₈alkyl)(C₁₋₈alkyl)amino-C₁₋₈alkyl;
[0397] wherein, each instance of heterocyclyl, C₃₋₁₄cycloalkyl, aryl and heteroaryl is optionally substituted with one, two or three R₃ substituents and optionally, with one additional R₄ substituent; or,
[0398] wherein, each instance of heterocyclyl, C₃₋₁₄cycloalkyl, aryl and heteroaryl is optionally substituted with one, two, three or four R₃ substituents;
[0399] R₂ is aryl, aryl-amino, aryl-amino-carbonyl, heterocyclyl, heteroaryl or heteroaryl-amino;
[0400] wherein, each instance of aryl, heterocyclyl and heteroaryl is optionally substituted with one, two or three R₆ substituents and optionally, with one additional R₇ substituent;
[0401] Rₐ is, in each instance, independently selected from hydrogen, halogen, C₁₋₈alkyl or deuterium;
[0402] R_{b} is hydrogen, halogen, C₁₋₈alkyl, C₁₋₈alkoxy or deuterium;
[0403] R_{c} is hydrogen, halogen, C₁₋₈alkyl or deuterium;
[0404] R₃ is, in each instance, independently selected from cyano, halogen, hydroxy, oxo, C₁₋₈alkyl, halo-C₁₋₈alkyl, C₁₋₈alkyl-carbonyl, C₁₋₈alkoxy, halo-C₁₋₈alkoxy, C₁₋₈alkoxy-C₁₋₈alkyl, C₁₋₈alkoxy-carbonyl, amino, C₁₋₈alkyl-amino, (C₁₋₈alkyl)₂-amino, amino-C₁₋₈alkyl, C₁₋₈alkyl-amino-C₁₋₈alkyl, (C₁₋₈alkyl)₂-amino-C₁₋₈alkyl, amino-C₁₋₈alkyl-amino, C₁₋₈alkyl-amino-C₁₋₈alkyl-amino, (C₁₋₈alkyl-amino-C₁₋₈alkyl)₂-amino, (C₁₋₈alkyl)₂-amino-C₁₋₈alkyl-amino, [(C₁₋₈alkyl)₂-amino-C₁₋₈alkyl]₂-amino, (C₁₋₈alkyl-amino-C₁₋₈alkyl)(C₁₋₈alkyl)amino, [(C₁₋₈alkyl)₂-amino-C₁₋₈alkyl](C₁₋₈alkyl)amino, C₁₋₈alkoxy-C₁₋₈alkyl-amino, (C₁₋₈alkoxy-C₁₋₈alkyl)₂-amino, (C₁₋₈alkoxy-C₁₋₈alkyl)(C₁₋₈alkyl)amino, C₁₋₈alkyl-carbonyl-amino, C₁₋₈alkoxy-carbonyl-amino, hydroxy-C₁₋₈alkyl, hydroxy-C₁₋₈alkoxy-C₁₋₈alkyl, hydroxy-C₁₋₈alkyl-amino, (hydroxy-C₁₋₈alkyl)₂-amino or (hydroxy-C₁₋₈alkyl)(C₁₋₈alkyl)amino;
[0405] R₄ is C₃₋₁₄cycloalkyl, C₃₋₁₄cycloalkyl-C₁₋₈alkyl, C₃₋₁₄cycloalkyl-amino, aryl-C₁₋₈alkyl, aryl-C₁₋₈alkoxy-carbonyl, aryl-sulfonyloxy-C₁₋₈alkyl, heterocyclyl or heterocyclyl-C₁₋₈alkyl; wherein, each instance of C₃₋₁₄cycloalkyl, aryl and heterocyclyl is optionally substituted with one, two or three R₅ substituents;
[0406] R₅ is, in each instance, independently selected from halogen, hydroxy, cyano, nitro, C₁₋₈alkyl, halo-C₁₋₈alkyl, C₁₋₈alkoxy, halo-C₁₋₈alkoxy, amino, C₁₋₈alkyl-amino, (C₁₋₈alkyl)₂-amino or C₁₋₈alkyl-thio;
[0407] R₆ is, in each instance, independently selected from halogen, hydroxy, cyano, nitro, C₁₋₈alkyl, C₂₋₈alkenyl, halo-C₁₋₈alkyl, hydroxy-C₁₋₈alkyl, C₁₋₈alkoxy, halo-C₁₋₈alkoxy, C₁₋₈alkoxy-C₁₋₈alkyl, amino, C₁₋₈alkyl-amino, (C₁₋₈alkyl)₂-amino or C₁₋₈alkyl-thio; and,
[0408] R₇ is C₃₋₁₄cycloalkyl, C₃₋₁₄cycloalkyl-oxy, aryl, heterocyclyl or heteroaryl.

[0409] In another aspect, provided herein is a method for modulating the amount of an RNA transcript comprising a RNA nucleotide sequence, wherein the RNA nucleotide sequence comprises two exons and an intron, wherein one exon is upstream of the intron and the other exon is downstream of the intron, wherein the RNA nucleotide sequence of the intron comprises in 5′ to 3′ order: an iREMS, a first branch point and a first 3′ splice site, wherein the iREMS comprises an RNA sequence GAgurngn (SEQ ID NO: 2), wherein r is adenine or guanine and n is any nucleotide, the method comprising contacting the RNA transcript with a compound of Formula (I) or a form thereof, wherein Formula (I) is:

[chemical structure]

[0410] wherein:
[0411] w₁ and w₅ are independently C—Rₐ or N;
[0412] w₂ is C—R_{b} or N;
[0413] w₃, w₄ and w₇ are independently C—R₁, C—R₂, C—Rₐ or N;
[0414] w₆ is C—R₁, C—R₂, C—R_{c} or N;
[0415] wherein one of w₃, w₄, w₆ and w₇ is C—R₁and one other of w₃, w₄, w₆ and w₇ is C—R₂, provided that,
[0416] when w₃ is C—R₁, then w₆ is C—R₂ and w₄ and w₇ are independently C—Rₐ or N; or,
[0417] when w₃ is C—R₂, then w₆ is C—R₁and w₄ and w₇ are independently C—Rₐ or N; or,
[0418] when w₄ is C—R₁, then w₇ is C—R₂ and w₃ is C—Rₐ or N and w₆ is C—R_{c} or N; or,
[0419] when w₄ is C—R₂, then w₇ is C—R₁and w₃ is C—Rₐ or N and w₆ is C—R_{c} or N; and,
[0420] wherein any one, two or three of w₁, w₂, w₃, w₄, w₅, w₆ and w₇ may optionally be N;
[0421] R₁ is C₁₋₈alkyl, amino, C₁₋₈alkyl-amino, (C₁₋₈alkyl)₂-amino, C₁₋₈alkoxy-C₁₋₈alkyl-amino, (C₁₋₈alkoxy-C₁₋₈alkyl)₂-amino, (C₁₋₈alkoxy-C₁₋₈alkyl)(C₁₋₈alkyl)amino, amino-C₁₋₈alkyl, C₁₋₈alkyl-amino-C₁₋₈alkyl, (C₁₋₈alkyl)₂-amino-C₁₋₈alkyl, C₁₋₈alkoxy-C₁₋₈alkyl-amino-C₁₋₈alkyl, (C₁₋₈alkoxy-C₁₋₈alkyl)₂-amino-C₁₋₈alkyl, (C₁₋₈alkoxy-C₁₋₈alkyl)(C₁₋₈alkyl)amino-C₁₋₈alkyl, amino-C₁₋₈alkyl-amino, (amino-C₁₋₈alkyl)₂-amino, (amino-C₁₋₈alkyl)(C₁₋₈alkyl)amino, C₁₋₈alkyl-amino-C₁₋₈alkyl-amino, (C₁₋₈alkyl-amino-C₁₋₈alkyl)₂-amino, (C₁₋₈alkyl-amino-C₁₋₈alkyl)(C₁₋₈alkyl)amino, (C₁₋₈alkyl)₂-amino-C₁₋₈alkyl-amino, [(C₁₋₈alkyl)₂-amino-C₁₋₈alkyl](C₁₋₈alkyl)amino, amino-C₁₋₈alkoxy, C₁₋₈alkyl-amino-C₁₋₈alkoxy, (C₁₋₈alkyl)₂-amino-C₁₋₈alkoxy, C₁₋₈alkoxy-C₁₋₈alkyl-amino-C₁₋₈alkoxy, C₁₋₈alkoxy-C₁₋₈alkyl-amino-C₁₋₈alkoxy, (C₁₋₈alkoxy-C₁₋₈alkyl)C₁₋₈alkyl)amino-C₁₋₈alkoxy, amino-C₂₋₈alkenyl, C₁₋₈alkyl-amino-C₂₋₈alkenyl, (C₁₋₈alkyl)₂-amino-C₂₋₈alkenyl, amino-C₂₋₈alkynyl, C₁₋₈alkyl-amino-C₂₋₈alkynyl, (C₁₋₈alkyl)₂-amino-C₂₋₈alkynyl, halo-C₁₋₈alkyl-amino, (halo-C₁₋₈alkyl)₂-amino, (halo-C₁₋₈alkyl)(C₁₋₈alkyl)amino, hydroxy-C₁₋₈alkyl, hydroxy-C₁₋₈alkoxy-C₁₋₈alkyl, hydroxy-C₁₋₈alkyl-amino, (hydroxy-C₁₋₈alkyl)₂-amino, (hydroxy-C₁₋₈alkyl)(C₁₋₈alkyl)amino, hydroxy-C₁₋₈alkyl-amino-C₁₋₈alkyl, (hydroxy-C₁₋₈alkyl)₂-amino-C₁₋₈alkyl, (hydroxy-C₁₋₈alkyl)(C₁₋₈alkyl)amino-C₁₋₈alkyl, hydroxy-C₁₋₈alkyl-amino-C₁₋₈alkoxy, (hydroxy-C₁₋₈alkyl)₂-amino-C₁₋₈alkoxy, (hydroxy-C₁₋₈alkyl)(C₁₋₈alkyl)amino-C₁₋₈alkoxy, hydroxy-C₁₋₈alkyl-amino-C₁₋₈alkyl-amino, (hydroxy-C₁₋₈alkyl-amino-C₁₋₈alkyl)₂-amino, (hydroxy-C₁₋₈alkyl)₂-amino-C₁₋₈alkyl-amino, (hydroxy-C₁₋₈alkyl-amino-C₁₋₈alkyl)(C₁₋₈alkyl)amino, (hydroxy-C₁₋₈alkyl)(C₁₋₈alkyl)amino-C₁₋₈alkyl-amino, [(hydroxy-C₁₋₈alkyl)₂-amino-C₁₋₈alkyl](C₁₋₈alkyl)amino, [(hydroxy-C₁₋₈alkyl)(C₁₋₈alkyl)amino-C₁₋₈alkyl](C₁₋₈alkyl)amino, heterocyclyl, heterocyclyl-C₁₋₈alkyl, heterocyclyl-C₁₋₈alkoxy, heterocyclyl-amino, (heterocyclyl)(C₁₋₈alkyl)amino, heterocyclyl-amino-C₁₋₈alkyl, heterocyclyl-C₁₋₈alkyl-amino, (heterocyclyl-C₁₋₈alkyl)₂-amino, (heterocyclyl-C₁₋₈alkyl)(C₁₋₈alkyl)amino, heterocyclyl-C₁₋₈alkyl-amino-C₁₋₈alkyl, (heterocyclyl-C₁₋₈alkyl)₂-amino-C₁₋₈alkyl, (heterocyclyl-C₁₋₈alkyl)(C₁₋₈alkyl)amino-C₁₋₈alkyl, heterocyclyl-oxy, heterocyclyl-carbonyl, heterocyclyl-carbonyl-oxy, C₃₋₁₄cycloalkyl, aryl-C₁₋₈alkyl-amino, (aryl-C₁₋₈alkyl)₂-amino, (aryl-C₁₋₈alkyl)(C₁₋₈alkyl)amino, aryl-C₁₋₈alkyl-amino-C₁₋₈alkyl, (aryl-C₁₋₈alkyl)₂-amino-C₁₋₈alkyl, (aryl-C₁₋₈alkyl)(C₁₋₈alkyl)amino-C₁₋₈alkyl, heteroaryl, heteroaryl-C₁₋₈alkyl, heteroaryl-C₁₋₈alkoxy, heteroaryl-amino, heteroaryl-C₁₋₈alkyl-amino, (heteroaryl-C₁₋₈alkyl)₂-amino, (heteroaryl-C₁₋₈alkyl)(C₁₋₈alkyl)amino, heteroaryl-C₁₋₈alkyl-amino-C₁₋₈alkyl, (heteroaryl-C₁₋₈alkyl)₂-amino-C₁₋₈alkyl or (heteroaryl-C₁₋₈alkyl)(C₁₋₈alkyl)amino-C₁₋₈alkyl;
[0422] wherein, each instance of heterocyclyl, C₃₋₁₄cycloalkyl, aryl and heteroaryl is optionally substituted with one, two or three R₃ substituents and optionally, with one additional R₄ substituent; or,
[0423] wherein, each instance of heterocyclyl, C₃₋₁₄cycloalkyl, aryl and heteroaryl is optionally substituted with one, two, three or four R₃ substituents;
[0424] R₂ is aryl, aryl-amino, aryl-amino-carbonyl, heterocyclyl, heteroaryl or heteroaryl-amino;
[0425] wherein, each instance of aryl, heterocyclyl and heteroaryl is optionally substituted with one, two or three R₆ substituents and optionally, with one additional R₇ substituent;
[0426] Rₐ is, in each instance, independently selected from hydrogen, halogen, C₁₋₈alkyl or deuterium;
[0427] R_{b} is hydrogen, halogen, C₁₋₈alkyl, C₁₋₈alkoxy or deuterium;
[0428] R_{c} is hydrogen, halogen, C₁₋₈alkyl or deuterium;
[0429] R₃ is, in each instance, independently selected from cyano, halogen, hydroxy, oxo, C₁₋₈alkyl, halo-C₁₋₈alkyl, C₁₋₈alkyl-carbonyl, C₁₋₈alkoxy, halo-C₁₋₈alkoxy, C₁₋₈alkoxy-C₁₋₈alkyl, C₁₋₈alkoxy-carbonyl, amino, C₁₋₈alkyl-amino, (C₁₋₈alkyl)₂-amino, amino-C₁₋₈alkyl, C₁₋₈alkyl-amino-C₁₋₈alkyl, (C₁₋₈alkyl)₂-amino-C₁₋₈alkyl, amino-C₁₋₈alkyl-amino, C₁₋₈alkyl-amino-C₁₋₈alkyl-amino, (C₁₋₈alkyl-amino-C₁₋₈alkyl)₂-amino, (C₁₋₈alkyl)₂-amino-C₁₋₈alkyl-amino, [(C₁₋₈alkyl)₂-amino-C₁₋₈alkyl]₂-amino, (C₁₋₈alkyl-amino-C₁₋₈alkyl)(C₁₋₈alkyl)amino, [(C₁₋₈alkyl)₂-amino-C₁₋₈alkyl](C₁₋₈alkyl)amino, C₁₋₈alkoxy-C₁₋₈alkyl-amino, (C₁₋₈alkoxy-C₁₋₈alkyl)₂-amino, (C₁₋₈alkoxy-C₁₋₈alkyl)(C₁₋₈alkyl)amino, C₁₋₈alkyl-carbonyl-amino, C₁₋₈alkoxy-carbonyl-amino, hydroxy-C₁₋₈alkyl, hydroxy-C₁₋₈alkoxy-C₁₋₈alkyl, hydroxy-C₁₋₈alkyl-amino, (hydroxy-C₁₋₈alkyl)₂-amino or (hydroxy-C₁₋₈alkyl)(C₁₋₈alkyl)amino;
[0430] R₄ is C₃₋₁₄cycloalkyl, C₃₋₁₄cycloalkyl-C₁₋₈alkyl, C₃₋₁₄cycloalkyl-amino, aryl-C₁₋₈alkyl, aryl-C₁₋₈alkoxy-carbonyl, aryl-sulfonyloxy-C₁₋₈alkyl, heterocyclyl or heterocyclyl-C₁₋₈alkyl; wherein, each instance of C₃₋₁₄cycloalkyl, aryl and heterocyclyl is optionally substituted with one, two or three R₅ substituents;
[0431] R₅ is, in each instance, independently selected from halogen, hydroxy, cyano, nitro, C₁₋₈alkyl, halo-C₁₋₈alkyl, C₁₋₈alkoxy, halo-C₁₋₈alkoxy, amino, C₁₋₈alkyl-amino, (C₁₋₈alkyl)₂-amino or C₁₋₈alkyl-thio;
[0432] R₆ is, in each instance, independently selected from halogen, hydroxy, cyano, nitro, C₁₋₈alkyl, C₂₋₈alkenyl, halo-C₁₋₈alkyl, hydroxy-C₁₋₈alkyl, C₁₋₈alkoxy, halo-C₁₋₈alkoxy, C₁₋₈alkoxy-C₁₋₈alkyl, amino, C₁₋₈alkyl-amino, (C₁₋₈alkyl)₂-amino or C₁₋₈alkyl-thio; and,
[0433] R₇ is C₃₋₁₄cycloalkyl, C₃₋₁₄cycloalkyl-oxy, aryl, heterocyclyl or heteroaryl.

[0434] In certain embodiments, the iREMS is an endogenous iREMS, and the RNA transcript is an RNA transcript of a gene that is selected from ABCA10, ABCB8, ABCC3, ACTA2, ADAL, ADAMTS1, ADCY3, ADD1, ADGRG6, ADH6, ADHFE1, AFF3, AGPAT4, AKAP3, ANK1, ANK3, ANKRA2, ANKRD33B, ANKRD36, AP4B1-AS1, APIP, ARHGAP1, ARHGAP12, ARHGEF16, ARID5B, ARL15, ARL9, ARMCX6, ASIC1, ATG5, ATP2A3, ATXN1, B3GALT2, B3GNT6, BCL2L15, BCYRN1, BECN1, BHMT2, BIN3-IT1, BIRC3, BIRC6, BTG2, BTN3A1, C10orf54, C11orf70, C11orf94, C12orf4, C12orf56, C14orf132, C19orf47, C1orf86, C3, C7orf31, C8orf34, C8orf44, C8orf44-SGK3, C8orf88, CA13, CA3, CACNA2D2, CACNB1, CADM1, CAND2, CASP7, CCDC122, CCDC79, CCER2, CCNF, CECR7, CELSR1, CEMIP, CENPI, CEP112, CEP170, CEP192, CFH, CHEK1, CIITA, CLDN23, CLTA, CMAHP, CNGA4, CNRIP1, CNTD1, COL11A1, COL14A1, COL15A1, COL5A1, COL5A3, COL6A6, COL8A1, COLEC12, COMP, CPA4, CPQ, CPSF4, CRISPLD2, CRLF1, CRYBG3, CRYL1, CSNK1E, CSNK1G1, CYB5R2, CYGB, CYP1B1, DAGLB, DCAF17, DCLK1, DCN, DDIT4L, DDX50, DEGS1, DEPTOR, DFNB59, DIRAS3, DLG5, DLGAP4, DNAH8, DNAJC13, DNAJC27, DNMBP, DOCK11, DYNC1I1, DYRK1A, DZIP1L, EFEMP1, EGR3, ELN, ELP4, EMX2OS, ENAH, ENPP1, EP300, ERCC1, ERCC8, ERGIC3, ERLIN2, ERRFI1, ESM1, EVC, EVC2, F2R, FAIM, FAM126A, FAM13A, FAM160A1, FAM162A, FAM174A, FAM20A, FAM46B, FAM65B, FAP, FARP1, FBLN2, FBN2, FBXL6, FCHO1, FGFR2, FGL2, FLT1, FRAS1, FSCN2, GAL3ST4, GALNT15, GATA6, GBGT1, GCNT1, GDF6, GGACT, GLCE, GNAQ, GPR183, GPR50, GPRC5A, GPRC5B, GRTP1, GUCA1B, GULP1, GXYLT1, HAPLN1, HAPLN2, HAS3, HAVCR2, HDAC5, HDX, HECTD2-AS1, HEPH, HEY1, HMGA2, HMGN3-AS1, HNMT, HOOK3, HPS1, HSPA1L, HTATIP2, IFT57, IGDCC4, IGF2R, IGFBP3, IL16, INA, INPP5K, INTU, IQCG, ITGA11, ITGA8, ITGB8, ITIH1, ITPKA, IVD, KAT6B, KCNS1, KCNS2, KDM6A, KDSR, KIAA1456, K1AA1462, K1AA1755, KIT, KLF17, KLRG1, KMT2D, KRT7, KRTAP1-1, KRTAP1-5, L3MBTL2, LAMB2P1, LETM2, LGI2, LGR4, LHX9, LINC00472, LINC00570, LINC00578, LINC00607, LINC00678, LTNC00702, LINC00886, LTNC00961, LINC01011, LTNC01118, LINC01204, LMOD1, LOC400927, LRBA, LRP4, LRRC32, LRRC39, LRRC42, LSAMP, LUM, LYPD1, LYRM1, MAFB, MAMDC2, MAN2A1, MAN2C1, MAPK13, MASP1, MB, MB21D2, MC4R, MCM10, MED13L, MEGF6, MFN2, MIAT, MIR612, MLLT10, MMP10, MMP24, MN1, MOXD1, MRPL45, MRPL55, MRPS28, MRVI1, MSH4, MTERF3, MXRA5, MYCBP2, NA, NAALADL2, NAE1, NAGS, NDNF, NGF, NGFR, NHLH1, NLN, NOTCH3, NOTUM, NOVA2, NOX4, NRROS, OCLN, OLR1, OSBPL10, OXCT1, OXCT2, PAIP2B, PBLD, PDE1C, PDE5A, PDGFD, PDGFRB, PDS5B, PEAR1, PHACTR3, PIGN, PIK3CD, PIK3R1, PIKFYVE, PIM2, PITPNM3, PLEK2, PLEKHA1, PLEKHA6, PLEKHH2, PLSCR1, PNISR, PODN, POLN, POLR1A, POMT2, PPARG, PPIP5K2, PPM1E, PPP1R26, PPP3CA, PRKCA, PRKG1, PRPF31, PRPH2, PRRG4, PRUNE2, PSMD6-AS2, PTGIS, PTX3, PXK, RAB30, RAB38, RAB44, RAD9B, RAF1, RAPGEF1, RARS, RARS2, RBBP8, RBKS, RDX, RERE, RFX3-AS1, RGCC, ROR1, ROR2, RPA1, RPS10, RPS6KB2, SAMD4A, SCARNA9, SEC24A, SENP6, SERGEF, SGK3, SH3YL1, SHROOM3, SIGLEC10, SKA2, SLC12A2, SLC24A3, SLC35F3, SLC39A10, SLC44A2, SLC46A2, SLC4A11, SLC6A15, SLC7A11, SLC9A3, SLIT3, SMG1P3, SMTN, SNED1, SNX7, SORBS2, SORCS2, SOX7, SPATA18, SPATA5, SPDYA, SPEF2, SPIDR, SPRYD7, SRGAP1, SRRM1, STAC2, STAT4, STK32B, STRN4, STS, STXBP6, SULF1, SVEP1, SYNGR2, SYNPO, SYNPO2, SYNPO2L, TAGLN3, TANGO6, TASP1, TCF12, TCF4, TGFA, TGFB2, TGFB3, TGM2, THBS2, TIAM1, TMC3, TMEM102, TMEM119, TMEM134, TMEM189-UBE2V1, TMEM214, TMEM256-PLSCR3, TMEM50B, TNFAIP8L3, TNFRSF14, TNRC18P1, TNRC6A, TNXB, TP53AIP1, TPRG1, TRIM66, TRPC4, TSHZ2, TSPAN11, TSPAN18, TSPAN7, TSSK3, TTC7B, TUBE1, TXNIP, TYW5, URGCP, USP27X, UVRAG, VAV2, VIM-AS1, VPS41, VSTM2L, VWF, WDR27, WDR91, WISP1, WNK1, WNT10B, YDJC, ZBTB26, ZCCHC5, ZCCHC8, ZFP82, ZMIZ1-AS1, ZNF138, ZNF212, ZNF232, ZNF350, ZNF431, ZNF660, ZNF680, ZNF79, or ZNF837.

[0435] In certain embodiments, the iREMS is an endogenous iREMS, and the RNA transcript is an RNA transcript of a gene that is selected from ABCB8, ABCC3, ADAM17, ADCY3, AGPAT4, ANKRA2, ANXA11, APIP, APLP2, APPL2, ARHGAP1, ARL15, ASAP1, ASPH, ATAD2B, ATXN1, AXIN1, BECN1, BHMT2, BICD1, BTN3A1, C11orf30, C11orf73, C12orf4, C14orf132, C8orf44, C8orf44-SGK3, C8orf38, CASC3, CASP7, CCDC122, CDH13, CECR7, CENPI, CEP112, CEP192, CHEK1, CMAHP, CNRIP1, COPS7B, CPSF4, CRISPLD2, CRYBG3, CSNK1E, CSNK1G1, DAGLB, DCAF17, DCUN1D4, DDX42, DENND1A, DENND5A, DGKA, DHFR, DIAPH3, DLGAP4, DNAJC13, DNMBP, DOCK1, DYRK1A, EIF2B3, ENAH, ENOX1, EP300, ERC1, ERCC1, ERGIC3, ERLIN2, ERRFI1, EVC, FAF1, FAIM, FAM126A, FAM13A, FAM162A, FAM174A, FAM198B, FBN2, FER, FHOD3, FOCAD, GALC, GCFC2, GGACT, GGCT, GLCE, GOLGA4, GOLGB1, GPSM2, GULP1, GXYLT1, HAT1, HDX, HLTF, HMGA2, HNMT, HPS1, HSD17B12, HSD17B4, HTT, IFT57, INPP5K, IVD, KDM6A, KIAA1524, KIAA1715, LETM2, LOC400927, LRRC42, LUC7L3, LYRM1, MADD, MB21D2, MCM10, MED13L, MEDAG, MEMO1, MFN2, MMS19, MRPL45, MRPS28, MTERF3, MYCBP2, MYLK, MYOF, NGF, NREP, NSUN4, NT5C2, OSMR, OXCT1, PAPD4, PCM1, PDE7A, PDS5B, PDXDC1, PIGN, PIK3CD, PIK3R1, PIKFYVE, PITPNB, PLEKHA1, PLSCR1, PMS1, POMT2, PPARG, PPHLN1, PPIP5K2, PPP1R26, PRPF31, PRSS23, PRUNE2, PSMA4, PXK, RAF1, RAPlA, RAPGEF1, RARS2, RBKS, RERE, RFWD2, RNFT1, RPA1, RPS10, RPS6KB2, SAMD4A, SAR1A, SCO1, SEC24A, SENP6, SERGEF, SGK3, SH3YL1, SKA2, SLC12A2, SLC25A17, SLC44A2, SMYD3, SNAP23, SNHG16, SNX7, SOS2, SPATA18, SPATA5, SPIDR, SPRYD7, SRGAP1, SRRM1, STAT1, STRN3, STXBP6, SUPT20H, TAF2, TASP1, TBCID15, TCF12, TCF4, TIAM1, TJP2, TMC3, TMEM189-UBE2V1, TMEM214, TNRC6A, TNS3, TOE1, TRAF3, TRIM65, TSPAN2, TTC7B, TUBE1, TYW5, UBAP2L, UBE2V1, URGCP, VAV2, VPS29, WDR27, WDR37, WDR91, WNK1, XRN2, ZCCHC8, ZFP82, ZNF138, ZNF232, ZNF37BP or ZNF680.

[0436] In certain embodiments, the iREMS is a non-endogenous IREMS. In a specific embodiment, the iREMS is a non-endogenous iREMS and the RNA transcript is an RNA transcript of a gene that is selected from ABCB8, ABCC3, ADAM17, ADCY3, AGPAT4, ANKRA2, ANXA11, APIP, APLP2, APPL2, ARHGAP1, ARL15, ASAP1, ASPH, ATAD2B, ATXN1, AXIN1, BECN1, BHMT2, BICD1, BTN3A1, C11orf30, C11orf73, C12orf4, C14orf132, C8orf44, C8orf44-SGK3, C8orf88, CASC3, CASP7, CCDC122, CDH13, CECR7, CENPI, CEP112, CEP192, CHEK1, CMAHP, CNRIP1, COPS7B, CPSF4, CRISPLD2, CRYBG3, CSNK1E, CSNK1G1, DAGLB, DCAF17, DCUN1D4, DDX42, DENND1A, DENND5A, DGKA, DHFR, DIAPH3, DLGAP4, DNAJC13, DNMBP, DOCK1, DYRK1A, EIF2B3, ENAH, ENOX1, EP300, ERC1, ERCC1, ERGIC3, ERLIN2, ERRFI1, EVC, FAF1, FAIM, FAM126A, FAM13A, FAM162A, FAM174A, FAM198B, FBN2, FER, FHOD3, FOCAD, GALC, GCFC2, GGACT, GGCT, GLCE, GOLGA4, GOLGB1, GPSM2, GULP1, GXYLT1, HAT1, HDX, HLTF, HMGA2, HNMT, HPS1, HSD17B12, HSD17B4, HTT, IFT57, INPP5K, IVD, KDM6A, K1AA1524, KIAA1715, LETM2, LOC400927, LRRC42, LUC7L3, LYRM1, MADD, MB21D2, MCM10, MED13L, MEDAG, MEMO1, MFN2, MMS19, MRPL45, MRPS28, MTERF3, MYCBP2, MYLK, MYOF, NGF, NREP, NSUN4, NT5C2, OSMR, OXCT1, PAPD4, PCM1, PDE7A, PDS5B, PDXDC1, PIGN, PIK3CD, PIK3R1, PIKFYVE, PITPNB, PLEKHA1, PLSCR1, PMS1, POMT2, PPARG, PPHLN1, PPIP5K2, PPP1R26, PRPF31, PRSS23, PRUNE2, PSMA4, PXK, RAF1, RAPlA, RAPGEF1, RARS2, RBKS, RERE, RFWD2, RNFT1, RPA1, RPS10, RPS6KB2, SAMD4A, SAR1A, SCO1, SEC24A, SENP6, SERGEF, SGK3, SH3YL1, SKA2, SLC12A2, SLC25A17, SLC44A2, SMYD3, SNAP23, SNHG16, SNX7, SOS2, SPATA18, SPATA5, SPIDR, SPRYD7, SRGAP1, SRRM1, STAT1, STRN3, STXBP6, SUPT20H, TAF2, TASP1, TBC1D15, TCF12, TCF4, TIAM1, TJP2, TMC3, TMEM189-UBE2V1, TMEM214, TNRC6A, TNS3, TOE1, TRAF3, TRIM65, TSPAN2, TTC7B, TUBE1, TYW5, UBAP2L, UBE2V1, URGCP, VAV2, VPS29, WDR27, WDR37, WDR91, WNK1, XRN2, ZCCHC8, ZFP82, ZNF138, ZNF232, ZNF37BP or ZNF680.

[0437] In one aspect, provided herein is a method for producing a mature mRNA transcript comprising iExon from a pre-mRNA transcript, wherein the pre-mRNA transcript comprises two exons and an intron, wherein one exon is upstream of the intron and the other exon is downstream of the intron, wherein the intron comprises in 5′ to 3′ order: a first 5′ splice site, a first branch point, a first 3′ splice site, an endogenous or non-endogenous intronic recognition element for splicing modifier (iREMS), a second branch point, and a second 3′ splice site, wherein the iREMS comprises an RNA sequence GAgurngn (SEQ ID NO: 2), wherein r is adenine or guanine and n is any nucleotide. In one embodiment, provided herein is a method for producing a mature mRNA transcript comprising an iExon, the method comprising contacting a pre-mRNA transcript with a compound described herein (e.g., a compound of Formula (I) or a form thereof), wherein the pre-mRNA transcript comprises two exons and an intron, wherein one exon is upstream of the intron and the other exon is downstream of the intron, wherein the intron comprises in 5′ to 3′ order: a first 5′ splice site, a first branch point, a first 3′ splice site, an endogenous or non-endogenous intronic recognition element for splicing modifier (iREMS), a second branch point, and a second 3′ splice site, wherein the iREMS comprises an RNA sequence GAgurngn (SEQ ID NO: 2), wherein r is adenine or guanine and n is any nucleotide. In another embodiment, provided herein is a method for producing a mature mRNA transcript comprising an iExon, the method comprising contacting a cell or cell lysate containing a pre-mRNA transcript with a compound described herein (e.g., a compound of Formula (I) or a form thereof), wherein the pre-mRNA transcript comprises two exons and an intron, wherein one exon is upstream of the intron and the other exon is downstream of the intron, wherein the intron comprises in 5′ to 3′ order: a first 5′ splice site, a first branch point, a first 3′ splice site, an endogenous or non-endogenous intronic recognition element for splicing modifier (iREMS), a second branch point, and a second 3′ splice site, wherein the iREMS comprises an RNA sequence GAgurngn (SEQ ID NO: 2), wherein r is adenine or guanine and n is any nucleotide. In some embodiments, the pre-mRNA transcript is encoded by a gene disclosed herein (e.g., in a table herein).

[0438] In a particular embodiment, provided herein is a method for producing a mature mRNA transcript comprising an iExon, the method comprising contacting a pre-mRNA transcript with a compound described herein (e.g., a compound of Formula (I) or a form thereof), wherein the pre-mRNA transcript comprises two exons and an intron, wherein one exon is upstream of the intron and the other exon is downstream of the intron, wherein the intron comprises in 5′ to 3′ order: a first 5′ splice site, a first branch point, a first 3′ splice site, an endogenous intronic recognition element for splicing modifier (iREMS), a second branch point, and a second 3′ splice site, wherein the iREMS comprises an RNA sequence GAgurngn (SEQ ID NO: 2), wherein r is adenine or guanine and n is any nucleotide, wherein the pre-mRNA transcript is a pre-mRNA transcript of a gene that is selected from ABCB8, ABCC3, ADAM17, ADCY3, AGPAT4, ANKRA2, ANXA11, APIP, APPL2, ARHGAP1, ARL15, ASAP1, ASPH, ATAD2B, ATXN1, BECN1, BHMT2, BICD1, BTN3A1, C11orf30, C11orf73, C12orf4, C14orf132, C8orf44, C8orf44-SGK3, C8orf88, CASC3, CASP7, CCDC122, CDH13, CECR7, CENPI, CEP112, CEP192, CHEK1, CMAHP, CNRIP1, COPS7B, CPSF4, CRISPLD2, CRYBG3, CSNK1E, CSNK1G1, DCAF17, DCUN1D4, DDX42, DENND1A, DENND5A, DGKA, DHFR, DIAPH3, DNAJC13, DNMBP, DOCK1, DYRK1A, EIF2B3, ENAH, ENOX1, EP300, ERC1, ERLIN2, ERRFI1, EVC, FAF1, FAIM, FAM126A, FAM13A, FAM162A, FAM174A, FBN2, FER, FHOD3, FOCAD, GALC, GCFC2, GGACT, GLCE, GOLGA4, GOLGB1, GPSM2, GULP1, GXYLT1, HDX, HLTF, HMGA2, HNMT, HSD17B12, HSD17B4, HTT, IFT57, IVD, KDM6A, KIAA1524, KIAA1715, LETM2, LOC400927, LRRC42, LUC7L3, LYRM1, MB21D2, MCM10, MED13L, MEDAG, MEMO1, MFN2, MMS19, MRPL45, MRPS28, MTERF3, MYCBP2, MYLK, MYOF, NGF, NREP, NSUN4, NT5C2, OSMR, OXCT1, PAPD4, PCM1, PDE7A, PDS5B, PDXDC1, PIGN, PIK3CD, PIK3R1, PIKFYVE, PITPNB, PLEKHA1, PLSCR1, PMS1, POMT2, PPARG, PPIP5K2, PPP1R26, PRPF31, PRSS23, PSMA4, PXK, RAF1, RAPGEF1, RARS2, RBKS, RERE, RFWD2, RPA1, RPS10, SAMD4A, SAR1A, SCO1, SEC24A, SENP6, SERGEF, SGK3, SLC12A2, SLC25A17, SLC44A2, SMYD3, SNAP23, SNHG16, SNX7, SOS2, SPATA5, SPIDR, SPRYD7, SRGAP1, SRRM1, STAT1, STXBP6, SUPT20H, TAF2, TASP1, TBC1D15, TCF12, TCF4, TIAM1, TJP2, TMC3, TMEM214, TNRC6A, TNS3, TOE1, TRAF3, TSPAN2, TTC7B, TYW5, UBAP2L, URGCP, VAV2, WDR27, WDR37, WDR91, WNK1, XRN2, ZCCHC8, ZFP82, ZNF138, ZNF232 or ZNF37BP. In another particular embodiment, provided herein is a method for producing a mature mRNA transcript comprising an iExon, the method comprising contacting a cell or cell lysate containing a pre-mRNA transcript with a compound described herein (e.g., a compound of Formula (I) or a form thereof), wherein the pre-mRNA transcript comprises two exons and an intron, wherein one exon is upstream of the intron and the other exon is downstream of the intron, wherein the intron comprises in 5′ to 3′ order: a first 5′ splice site, a first branch point, a first 3′ splice site, an endogenous intronic recognition element for splicing modifier (iREMS), a second branch point, and a second 3′ splice site, wherein the iREMS comprises an RNA sequence GAgurngn (SEQ ID NO: 2), wherein r is adenine or guanine and n is any nucleotide, wherein the pre-mRNA transcript is a pre-mRNA transcript of a gene that is selected from ABCB8, ABCC3, ADAM17, ADCY3, AGPAT4, ANKRA2, ANXA11, APIP, APPL2, ARHGAP1, ARL15, ASAP1, ASPH, ATAD2B, ATXN1, BECN1, BHMT2, BICD1, BTN3A1, C11orf30, C11orf73, C12orf4, C14orf132, C8orf44, C8orf44-SGK3, C8orf88, CASC3, CASP7, CCDC122, CDH13, CECR7, CENPI, CEP112, CEP192, CHEK1, CMAHP, CNRIP1, COPS7B, CPSF4, CRISPLD2, CRYBG3, CSNK1E, CSNK1G1, DCAF17, DCUN1D4, DDX42, DENND1A, DENND5A, DGKA, DHFR, DIAPH3, DNAJC13, DNMBP, DOCK1, DYRK1A, EIF2B3, ENAH, ENOX1, EP300, ERC1, ERLIN2, ERRFI1, EVC, FAF1, FAIM, FAM126A, FAM13A, FAM162A, FAM174A, FBN2, FER, FHOD3, FOCAD, GALC, GCFC2, GGACT, GLCE, GOLGA4, GOLGB1, GPSM2, GULP1, GXYLT1, HDX, HLTF, HMGA2, HNMT, HSD17B12, HSD17B4, HTT, IFT57, IVD, KDM6A, KIAA1524, KIAA1715, LETM2, LOC400927, LRRC42, LUC7L3, LYRM1, MB21D2, MCM10, MED13L, MEDAG, MEMO1, MFN2, MMS19, MRPL45, MRPS28, MTERF3, MYCBP2, MYLK, MYOF, NGF, NREP, NSUN4, NT5C2, OSMR, OXCT1, PAPD4, PCM1, PDE7A, PDS5B, PDXDC1, PIGN, PIK3CD, PIK3R1, PIKFYVE, PITPNB, PLEKHA1, PLSCR1, PMS1, POMT2, PPARG, PPIP5K2, PPP1R26, PRPF31, PRSS23, PSMA4, PXK, RAF1, RAPGEF1, RARS2, RBKS, RERE, RFWD2, RPA1, RPS10, SAMD4A, SAR1A, SCO1, SEC24A, SENP6, SERGEF, SGK3, SLC12A2, SLC25A17, SLC44A2, SMYD3, SNAP23, SNHG16, SNX7, SOS2, SPATA5, SPIDR, SPRYD7, SRGAP1, SRRM1, STAT1, STXBP6, SUPT20H, TAF2, TASP1, TBC1D15, TCF12, TCF4, TIAM1, TJP2, TMC3, TMEM214, TNRC6A, TNS3, TOE1, TRAF3, TSPAN2, TTC7B, TYW5, UBAP2L, URGCP, VAV2, WDR27, WDR37, WDR91, WNK1, XRN2, ZCCHC8, ZFP82, ZNF138, ZNF232 or ZNF37BP.

[0439] In another aspect, provided herein is a method modulating the amount of a mature mRNA transcript produced by a pre-mRNA transcript, wherein the pre-mRNA transcript comprises two exons and an intron, wherein one exon is upstream of the intron and the other exon is downstream of the intron, wherein the intron comprises a RNA nucleotide sequence comprising in 5′ to 3′ order: an endogenous or non-endogenous intronic recognition element for splicing modifier (iREMS), a first branch point, and a first 3′ splice site, wherein the iREMS comprises an RNA sequence GAgurngn (SEQ ID NO: 2), wherein r is adenine or guanine and n is any nucleotide. In one embodiment, provided herein is a method for modulating the amount of a mature mRNA transcript produced by a pre-mRNA transcript, the method comprising contacting the pre-mRNA transcript with a compound described herein (e.g., a compound of Formula (I) or a form thereof), wherein the pre-mRNA transcript comprises two exons and an intron, wherein one exon is upstream of the intron and the other exon is downstream of the intron, wherein the intron comprises a RNA nucleotide sequence comprising in 5′ to 3′ order: an endogenous or non-endogenous intronic recognition element for splicing modifier (iREMS), a first branch point, and a first 3′ splice site, wherein the iREMS comprises an RNA sequence GAgurngn (SEQ ID NO: 2), wherein r is adenine or guanine and n is any nucleotide. In another embodiment, provided herein is a method for modulating the amount of a mature mRNA transcript produced by a pre-mRNA transcript, the method comprising contacting a cell or cell lysate containing the pre-mRNA transcript with a compound described herein (e.g., a compound of Formula (I) or a form thereof), wherein the pre-mRNA transcript comprises two exons and an intron, wherein one exon is upstream of the intron and the other exon is downstream of the intron, wherein the intron comprises a RNA nucleotide sequence comprising in 5′ to 3′ order: an endogenous or non-endogenous intronic recognition element for splicing modifier (iREMS), a first branch point, and a first 3′ splice site, wherein the iREMS comprises an RNA sequence GAgurngn (SEQ ID NO: 2), wherein r is adenine or guanine and n is any nucleotide. In some embodiments, the intron further comprises a first 5′ splice site, a second branch point, and a second 3′ splice site upstream of the iREMS. In some embodiments, the pre-mRNA transcript is encoded by a gene disclosed herein (e.g., in a table herein).

[0440] In a particular embodiment, provided herein is a method for modulating the amount of a mature mRNA transcript produced by a pre-mRNA transcript, the method comprising contacting the pre-mRNA transcript with a compound described herein (e.g., a compound of Formula (I) or a form thereof), wherein the pre-mRNA transcript comprises two exons and an intron, wherein one exon is upstream of the intron and the other exon is downstream of the intron, wherein the intron comprises a RNA nucleotide sequence comprising in 5′ to 3′ order: an endogenous intronic recognition element for splicing modifier (iREMS), a first branch point, and a first 3′ splice site, wherein the iREMS comprises an RNA sequence GAgurngn (SEQ ID NO: 2), wherein r is adenine or guanine and n is any nucleotide, and wherein the pre-mRNA transcript is a pre-mRNA transcript of a gene that is selected from ABCA10, ABCB8, ABCC3, ACTA2, ADAL, ADAMTS1, ADCY3, ADD1, ADGRG6, ADH6, ADHFE1, AFF3, AGPAT4, AKAP3, ANK1, ANK3, ANKRA2, ANKRD33B, ANKRD36, AP4B1-AS1, APIP, ARHGAP1, ARHGAP12, ARHGEF16, ARID5B, ARL15, ARL9, ARMCX6, ASIC1, ATG5, ATP2A3, ATXN1, B3GALT2, B3GNT6, BCL2L15, BCYRN1, BECN1, BHMT2, BIN3-IT1, BIRC3, BIRC6, BTG2, BTN3A1, C10orf54, C11orf70, C11orf94, C12orf4, C12orf56, C14orf132, C19orf47, C1orf86, C3, C7orf31, C8orf34, C8orf44, C8orf44-SGK3, C8orf88, CA13, CA3, CACNA2D2, CACNB1, CADM1, CAND2, CASP7, CCDC122, CCDC79, CCER2, CCNF, CECR7, CELSR1, CEMIP, CENPI, CEP112, CEP170, CEP192, CFH, CHEK1, CIITA, CLDN23, CLTA, CMAHP, CNGA4, CNRIP1, CNTD1, COL11A1, COL14A1, COL15A1, COL5A1, COL5A3, COL6A6, COL8A1, COLEC12, COMP, CPA4, CPQ, CPSF4, CRISPLD2, CRLF1, CRYBG3, CRYL1, CSNK1E, CSNK1G1, CYB5R2, CYGB, CYP1B1, DAGLB, DCAF17, DCLK1, DCN, DDIT4L, DDX50, DEGS1, DEPTOR, DFNB59, DIRAS3, DLG5, DLGAP4, DNAH8, DNAJC13, DNAJC27, DNMBP, DOCK11, DYNC1I1, DYRK1A, DZIP1L, EFEMP1, EGR3, ELN, ELP4, EMX2OS, ENAH, ENPP1, EP300, ERCC1, ERCC8, ERGIC3, ERLIN2, ERRFI1, ESM1, EVC, EVC2, F2R, FAIM, FAM126A, FAM13A, FAM160A1, FAM162A, FAM174A, FAM20A, FAM46B, FAM65B, FAP, FARP1, FBLN2, FBN2, FBXL6, FCHO1, FGFR2, FGL2, FLT1, FRAS1, FSCN2, GAL3ST4, GALNT15, GATA6, GBGT1, GCNT1, GDF6, GGACT, GLCE, GNAQ, GPR183, GPR50, GPRC5A, GPRC5B, GRTP1, GUCA1B, GULP1, GXYLT1, HAPLN1, HAPLN2, HAS3, HAVCR2, HDAC5, HDX, HECTD2-AS1, HEPH, HEY1, HMGA2, HMGN3-AS1, HNMT, HOOK3, HPS1, HSPA1L, HTATIP2, IFT57, IGDCC4, IGF2R, IGFBP3, IL16, INA, INPP5K, INTU, IQCG, ITGA11, ITGA8, ITGB8, ITIH1, ITPKA, IVD, KAT6B, KCNS1, KCNS2, KDM6A, KDSR, KIAA1456, KIAA1462, KIAA1755, KIT, KLF17, KLRG1, KMT2D, KRT7, KRTAP1-1, KRTAP1-5, L3MBTL2, LAMB2P1, LETM2, LGI2, LGR4, LHX9, LINC00472, LINC00570, LINC00578, LINC00607, LINC00678, LINC00702, LINC00886, LINC00961, LINC01011, LINC01118, LINC01204, LMOD1, LOC400927, LRBA, LRP4, LRRC32, LRRC39, LRRC42, LSAMP, LUM, LYPD1, LYRM1, MAFB, MAMDC2, MAN2A1, MAN2C1, MAPK13, MASP1, MB, MB21D2, MC4R, MCM10, MED13L, MEGF6, MFN2, MIAT, MIR612, MLLT10, MMP10, MMP24, MN1, MOXD1, MRPL45, MRPL55, MRPS28, MRVI1, MSH4, MTERF3, MXRA5, MYCBP2, NA, NAALADL2, NAE1, NAGS, NDNF, NGF, NGFR, NHLH1, NLN, NOTCH3, NOTUM, NOVA2, NOX4, NRROS, OCLN, OLR1, OSBPL10, OXCT1, OXCT2, PAIP2B, PBLD, PDE1C, PDE5A, PDGFD, PDGFRB, PDS5B, PEAR1, PHACTR3, PIGN, PIK3CD, PIK3R1, PIKFYVE, PIM2, PITPNM3, PLEK2, PLEKHA1, PLEKHA6, PLEKHH2, PLSCR1, PNISR, PODN, POLN, POLR1A, POMT2, PPARG, PPIP5K2, PPM1E, PPP1R26, PPP3CA, PRKCA, PRKG1, PRPF31, PRPH2, PRRG4, PRUNE2, PSMD6-AS2, PTGIS, PTX3, PXK, RAB30, RAB38, RAB44, RAD9B, RAF1, RAPGEF1, RARS, RARS2, RBBP8, RBKS, RDX, RERE, RFX3-AS1, RGCC, ROR1, ROR2, RPA1, RPS10, RPS6KB2, SAMD4A, SCARNA9, SEC24A, SENP6, SERGEF, SGK3, SH3YL1, SHROOM3, SIGLEC10, SKA2, SLC12A2, SLC24A3, SLC35F3, SLC39A10, SLC44A2, SLC46A2, SLC4A11, SLC6A15, SLC7A11, SLC9A3, SLIT3, SMG1P3, SMTN, SNED1, SNX7, SORBS2, SORCS2, SOX7, SPATA18, SPATA5, SPDYA, SPEF2, SPIDR, SPRYD7, SRGAP1, SRRM1, STAC2, STAT4, STK32B, STRN4, STS, STXBP6, SULF1, SVEP1, SYNGR2, SYNPO, SYNPO2, SYNPO2L, TAGLN3, TANGO6, TASP1, TCF12, TCF4, TGFA, TGFB2, TGFB3, TGM2, THBS2, TIAM1, TMC3, TMEM102, TMEM119, TMEM134, TMEM189-UBE2V1, TMEM214, TMEM256-PLSCR3, TMEM50B, TNFAIP8L3, TNFRSF14, TNRC18P1, TNRC6A, TNXB, TP53AIP1, TPRG1, TRIM66, TRPC4, TSHZ2, TSPAN11, TSPAN18, TSPAN7, TSSK3, TTC7B, TUBE1, TXNIP, TYW5, URGCP, USP27X, UVRAG, VAV2, VIM-AS1, VPS41, VSTM2L, VWF, WDR27, WDR91, WISP1, WNK1, WNT10B, YDJC, ZBTB26, ZCCHC5, ZCCHC8, ZFP82, ZMIZ1-AS1, ZNF138, ZNF212, ZNF232, ZNF350, ZNF431, ZNF660, ZNF680, ZNF79, or ZNF837. In a particular embodiment, provided herein is a method for modulating the amount of a mature mRNA transcript produced by a pre-mRNA transcript, the method comprising contacting a cell or cell lysate containing the pre-mRNA transcript with a compound described herein (e.g., a compound of Formula (I) or a form thereof), wherein the pre-mRNA transcript comprises two exons and an intron, wherein one exon is upstream of the intron and the other exon is downstream of the intron, wherein the intron comprises a RNA nucleotide sequence comprising in 5′ to 3′ order: an endogenous intronic recognition element for splicing modifier (iREMS), a first branch point, and a first 3′ splice site, wherein the iREMS comprises an RNA sequence GAgurngn (SEQ ID NO: 2), wherein r is adenine or guanine and n is any nucleotide, and wherein the pre-mRNA transcript is a pre-mRNA transcript of a gene that is selected from ABCA10, ABCB8, ABCC3, ACTA2, ADAL, ADAMTS1, ADCY3, ADD1, ADGRG6, ADH6, ADHFE1, AFF3, AGPAT4, AKAP3, ANK1, ANK3, ANKRA2, ANKRD33B, ANKRD36, AP4B1-AS1, APIP, ARHGAP1, ARHGAP12, ARHGEF16, ARID5B, ARL15, ARL9, ARMCX6, ASIC1, ATG5, ATP2A3, ATXN1, B3GALT2, B3GNT6, BCL2L15, BCYRN1, BECN1, BHMT2, BIN3-IT1, BIRC3, BIRC6, BTG2, BTN3A1, C10orf54, C11orf70, C11orf94, C12orf4, C12orf56, C14orf132, C19orf47, C1orfB6, C3, C7orf31, C8orf34, C8orf44, C8orf44-SGK3, C8orf88, CA13, CA3, CACNA2D2, CACNB1, CADM1, CAND2, CASP7, CCDC122, CCDC79, CCER2, CCNF, CECR7, CELSR1, CEMIP, CENPI, CEP112, CEP170, CEP192, CFH, CHEK1, CIITA, CLDN23, CLTA, CMAHP, CNGA4, CNRIP1, CNTD1, COL11A1, COL14A1, COL15A1, COL5A1, COL5A3, COL6A6, COL8A1, COLEC12, COMP, CPA4, CPQ, CPSF4, CRISPLD2, CRLF1, CRYBG3, CRYL1, CSNK1E, CSNK1G1, CYB5R2, CYGB, CYP1B1, DAGLB, DCAF17, DCLK1, DCN, DDIT4L, DDX50, DEGS1, DEPTOR, DFNB59, DIRAS3, DLG5, DLGAP4, DNAH8, DNAJC13, DNAJC27, DNMBP, DOCK11, DYNC1I1, DYRK1A, DZIP1L, EFEMP1, EGR3, ELN, ELP4, EMX2OS, ENAH, ENPP1, EP300, ERCC1, ERCC8, ERGIC3, ERLIN2, ERRFI1, ESM1, EVC, EVC2, F2R, FAIM, FAM126A, FAM13A, FAM160A1, FAM162A, FAM174A, FAM20A, FAM46B, FAM65B, FAP, FARP1, FBLN2, FBN2, FBXL6, FCHO1, FGFR2, FGL2, FLT1, FRAS1, FSCN2, GAL3ST4, GALNT15, GATA6, GBGT1, GCNT1, GDF6, GGACT, GLCE, GNAQ, GPR183, GPR50, GPRC5A, GPRC5B, GRTP1, GUCA1B, GULP1, GXYLT1, HAPLN1, HAPLN2, HAS3, HAVCR2, HDAC5, HDX, HECTD2-AS1, HEPH, HEY1, HMGA2, HMGN3-AS1, HNMT, HOOK3, HPS1, HSPA1L, HTATIP2, IFT57, IGDCC4, IGF2R, IGFBP3, IL16, INA, INPP5K, INTU, TQCG, TTGA11, ITGA8, TTGB8, ITIH1, TTPKA, IVD, KAT6B, KCNS1, KCNS2, KDM6A, KDSR, KIAA1456, KIAA1462, KIAA1755, KIT, KLF17, KLRG1, KMT2D, KRT7, KRTAP1-1, KRTAP1-5, L3MBTL2, LAMB2P1, LETM2, LGI2, LGR4, LHX9, LINC00472, LINC00570, LINC00578, LINC00607, LINC00678, LINC00702, LINC00886, LINC00961, LINC01011, LINC01118, LINC01204, LMOD1, LOC400927, LRBA, LRP4, LRRC32, LRRC39, LRRC42, LSAMP, LUM, LYPD1, LYRM1, MAFB, MAMDC2, MAN2A1, MAN2C1, MAPK13, MASP1, MB, MB21D2, MC4R, MCM10, MED13L, MEGF6, MFN2, MIAT, MIR612, MLLT10, MMP10, MMP24, MN1, MOXD1, MRPL45, MRPL55, MRPS28, MRVI1, MSH4, MTERF3, MXRA5, MYCBP2, NA, NAALADL2, NAE1, NAGS, NDNF, NGF, NGFR, NHLH1, NLN, NOTCH3, NOTUM, NOVA2, NOX4, NRROS, OCLN, OLR1, OSBPL10, OXCT1, OXCT2, PAIP2B, PBLD, PDE1C, PDE5A, PDGFD, PDGFRB, PDS5B, PEAR1, PHACTR3, PIGN, PIK3CD, PIK3R1, PIKFYVE, PIM2, PITPNM3, PLEK2, PLEKHA1, PLEKHA6, PLEKHH2, PLSCR1, PNISR, PODN, POLN, POLR1A, POMT2, PPARG, PPIP5K2, PPM1E, PPP1R26, PPP3CA, PRKCA, PRKG1, PRPF31, PRPH2, PRRG4, PRUNE2, PSMD6-AS2, PTGIS, PTX3, PXK, RAB30, RAB38, RAB44, RAD9B, RAF1, RAPGEF1, RARS, RARS2, RBBP8, RBKS, RDX, RERE, RFX3-A S1, RGCC, ROR1, ROR2, RPA1, RPS10, RPS6KB2, SAMD4A, SCARNA9, SEC24A, SENP6, SERGEF, SGK3, SH3YL1, SHROOM3, SIGLEC10, SKA2, SLC12A2, SLC24A3, SLC35F3, SLC39A10, SLC44A2, SLC46A2, SLC4A11, SLC6A15, SLC7A11, SLC9A3, SLIT3, SMG1P3, SMTN, SNED1, SNX7, SORBS2, SORCS2, SOX7, SPATA18, SPATA5, SPDYA, SPEF2, SPIDR, SPRYD7, SRGAP1, SRRM1, STAC2, STAT4, STK32B, STRN4, STS, STXBP6, SULF1, SVEP1, SYNGR2, SYNPO, SYNPO2, SYNPO2L, TAGLN3, TANGO6, TASP1, TCF12, TCF4, TGFA, TGFB2, TGFB3, TGM2, THBS2, TIAM1, TMC3, TMEM102, TMEM119, TMEM134, TMEM189-UBE2V1, TMEM214, TMEM256-PLSCR3, TMEM50B, TNFAIP8L3, TNFRSF14, TNRC18P1, TNRC6A, TNXB, TP53AIP1, TPRG1, TRIM66, TRPC4, TSHZ2, TSPAN11, TSPAN18, TSPAN7, TSSK3, TTC7B, TUBE1, TXNIP, TYW5, URGCP, USP27X, UVRAG, VAV2, VIM-AS1, VPS41, VSTM2L, VWF, WDR27, WDR91, WISP1, WNK1, WNT10B, YDJC, ZBTB26, ZCCHC5, ZCCHC8, ZFP82, ZMIZ1-AS1, ZNF138, ZNF212, ZNF232, ZNF350, ZNF431, ZNF660, ZNF680, ZNF79, or ZNF837. In some embodiments, the intron further comprises a first 5′ splice site, a second branch point, and a second 3′ splice site upstream of the iREMS.

[0441] In one aspect, provided herein is a method for preventing, treating or preventing and treating a disease or disorder in which a change in the level of expression of one, two, three or more RNA isoforms encoded by a gene is beneficial to the prevention and/or treatment of the disease, the method comprising administering a compound described herein to a subject in need thereof, wherein the one, two, three or more RNA isoforms are produced from a pre-mRNA transcript comprising two exons and an intron, wherein one exon is upstream of the intron and the other exon is downstream of the intron, wherein the intron comprises in 5′ to 3′ order: a first 5′ splice site, a first branch point, a first 3′ splice site, an endogenous intronic recognition element for splicing modifier (iREMS), a second branch point, and a second 3′ splice site, wherein the iREMS comprises an RNA sequence GAgurngn (SEQ ID NO: 2), wherein r is adenine or guanine and n is any nucleotide.

[0442] In one aspect, provided herein is a method for preventing, treating or preventing and treating a disease or disorder in which a change in the level of expression of one, two, three or more RNA isoforms encoded by a gene is beneficial to the prevention and/or treatment of the disease, the method comprising administering a compound described herein to a subject in need thereof, wherein the one, two, three or more RNA isoforms are produced from a pre-mRNA transcript comprising two exons and an intron, wherein one exon is upstream of the intron and the other exon is downstream of the intron, wherein the intron comprises in 5′ to 3′ order: an endogenous intronic recognition element for splicing modifier (iREMS), a first branch point, and a first 3′ splice site, wherein the iREMS comprises an RNA sequence GAgurngn (SEQ ID NO: 2), wherein r is adenine or guanine and n is any nucleotide.

[0443] In another aspect, provided herein is an artificial gene construct comprising an RNA sequence comprising exons and one or more introns, wherein at least one intron comprises an iREMS that is downstream of a branch point and a 3′ splice site, and wherein the iREMS comprises the sequence GAgurngn (SEQ ID NO: 2), wherein r is adenine or guanine and n is any nucleotide.

[0444] In another aspect, provided herein is an artificial gene construct comprising an RNA sequence comprising two exons and an intron, wherein one exon is upstream of the intron and the other exon is downstream of the intron, wherein the RNA nucleotide sequence of the intron comprises in 5′ to 3′ order: a first 5′ splice site, a first branch point, a first 3′ splice site, an iREMS, a second branch point and a second 3′ splice site, wherein the iREMS comprises an RNA sequence GAgurngn (SEQ ID NO: 2), wherein r is adenine or guanine and n is any nucleotide.

[0445] In another aspect, provide herein is an artificial gene construct comprising an RNA sequence comprising two exons and an intron, wherein one exon is upstream of the intron and the other exon is downstream of the intron, wherein the RNA nucleotide sequence of the intron comprises in 5′ to 3′ order: an iREMS, a first branch point and a first 3′ splice site, wherein the iREMS comprises an RNA sequence GAgurngn (SEQ ID NO: 2), wherein r is adenine or guanine and n is any nucleotide.

[0446] In various embodiments of the aspects and embodiments described herein, the iREMS comprises an RNA sequence GAguragu, wherein r is adenine or guanine.

[0447] In various embodiments of the aspects and embodiments described herein, the iREMS comprises an RNA sequence NNGAgurngn (SEQ ID NO: 1), wherein r is adenine or guanine and n or N is any nucleotide. In a specific embodiment, the RNA sequence NNGAgurngn (SEQ ID NO: 1) is selected from the group consisting of ANGAgurngn (SEQ ID NO: 29), CNGAgurngn (SEQ ID NO: 35), GNGAgurngn (SEQ ID NO: 41), UNGAgurngn (SEQ ID NO: 47), NAGAgurngn (SEQ ID NO: 30), NCGAgurngn (SEQ ID NO: 36), NGGAgurngn (SEQ ID NO: 42), NUGAgurngn (SEQ ID NO: 48), AAGAgurngn (SEQ ID NO: 31), ACGAgurngn (SEQ ID NO: 37), AGGAgurngn (SEQ ID NO: 43), AUGAgurngn (SEQ ID NO: 49), CAGAgurngn (SEQ ID NO: 32), CCGAgurngn (SEQ ID NO: 38), CGGAgurngn (SEQ ID NO: 44), CUGAgurngn (SEQ ID NO: 50), GAGAgurngn (SEQ ID NO: 33), GCGAgurngn (SEQ ID NO: 39), GGGAgurngn (SEQ ID NO: 45), GUGAgurngn (SEQ ID NO: 51), UAGAgurngn (SEQ ID NO: 34), UCGAgurngn (SEQ ID NO: 40), UGGAgurngn (SEQ ID NO: 46) and UUGAgurngn (SEQ ID NO: 52), wherein r is adenine or guanine and n or N is any nucleotide.

[0448] In various embodiments of the aspects and embodiments described herein, the iREMS comprises an RNA sequence NNGAguragu (SEQ ID NO: 3862), wherein r is adenine or guanine and N is any nucleotide. In a specific embodiment, the RNA sequence NNGAguragu (SEQ ID NO: 3862) is selected from the group consisting of ANGAguragu (SEQ ID NO: 437), CNGAguragu (SEQ ID NO: 443), GNGAguragu (SEQ ID NO: 449), UNGAguragu (SEQ ID NO: 455), NAGAguragu (SEQ ID NO: 438), NCGAguragu (SEQ ID NO: 444), NGGAguragu (SEQ ID NO: 450), NUGAguragu (SEQ ID NO: 456), AAGAguragu (SEQ ID NO: 439), ACGAguragu (SEQ ID NO: 445), AGGAguragu (SEQ ID NO: 451), AUGAguragu (SEQ ID NO: 457), CAGAguragu (SEQ ID NO: 440), CCGAguragu (SEQ ID NO: 446), CGGAguragu (SEQ ID NO: 452), CUGAguragu (SEQ ID NO: 458), GAGAguragu (SEQ ID NO: 441), GCGAguragu (SEQ ID NO: 447), GGGAguragu (SEQ ID NO: 453), GUGAguragu (SEQ ID NO: 459), UAGAguragu (SEQ ID NO: 442), UCGAguragu (SEQ ID NO: 448), UGGAguragu (SEQ ID NO: 454) and UUGAguragu (SEQ ID NO: 460), wherein r is adenine or guanine, and N is any nucleotide.

[0449] In various embodiments of the method for modulating the amount of an RNA transcript described herein, modulation of the amount of the RNA transcript is modulation of the amount of the RNA transcript in a cell or a lysate of the cell, and the method comprises contacting the compound of Formula (I) or a form thereof with the cell or cell lysate. In a specific embodiment, modulation of the amount of the RNA transcript is modulation of the amount of the RNA transcript in a cell, and the method comprises contacting the compound of Formula (I) or a form thereof with the cell. In a specific embodiment, the modulation modulates the amount and/or type of a protein translated from the RNA transcript and produced in the cell or lysate of the cell.

[0450] In various embodiments of the method for modulating the amount of an RNA transcript described herein, the RNA transcript encodes a detectable reporter protein.

[0451] In another aspect, provided herein is an artificial gene construct comprising a DNA sequence encoding exons and one or more introns, wherein the nucleotide sequence encoding at least one intron comprises an iREMS that is downstream of the nucleotide sequence encoding a branch point and the nucleotide sequence encoding a 3′ splice site, and wherein the iREMS comprises the sequence GAgtrngn (SEQ ID NO: 4), wherein r is adenine or guanine and n is any nucleotide.

[0452] In another aspect, provided herein is an artificial gene construct comprising a DNA sequence encoding two exons and an intron, wherein the nucleotide sequence encoding one exon is upstream of the nucleotide sequence encoding the intron and the nucleotide sequence encoding the other exon is downstream of the nucleotide sequence encoding the intron, wherein the nucleotide sequence encoding the intron comprises in 5′ to 3′ order: the nucleotide sequence encoding a first 5′ splice site, the nucleotide sequence encoding a first branch point, the nucleotide sequence encoding a first 3′ splice site, an iREMS, the nucleotide sequence encoding a second branch point and the nucleotide sequence encoding a second 3′ splice site, wherein the iREMS comprises a DNA sequence GAgtrngn (SEQ ID NO: 4), wherein r is adenine or guanine and n is any nucleotide.

[0453] In another aspect, provide herein is an artificial gene construct comprising a DNA sequence encoding two exons and an intron, wherein the nucleotide sequence encoding one exon is upstream of the nucleotide sequence encoding the intron and the nucleotide sequence encoding the other exon is downstream of the nucleotide sequence encoding the intron, wherein the nucleotide sequence encoding the intron comprises in 5′ to 3′ order: an iREMS, the nucleotide sequence encoding a first branch point and the nucleotide sequence encoding a first 3′ splice site, wherein the iREMS comprises an DNA sequence GAgtrngn (SEQ ID NO: 4), wherein r is adenine or guanine and n is any nucleotide.

[0454] In various embodiments of the aspects and embodiments described herein, the iREMS comprises a DNA sequence GAgtragt, wherein r is adenine or guanine.

[0455] In various embodiments of the aspects and embodiments described herein, the iREMS comprises a DNA sequence NNGAgtrngn (SEQ ID NO: 1), wherein r is adenine or guanine and n or N is any nucleotide. In a specific embodiment, the DNA sequence NNGAgtrngn (SEQ ID NO: 1) is selected from the group consisting of ANGAgtrngn (SEQ ID NO: 29), CNGAgtrngn (SEQ ID NO: 35), GNGAgtrngn (SEQ ID NO: 41), TNGAgtrngn (SEQ ID NO: 47), NAGAgtrngn (SEQ ID NO: 30), NCGAgtrngn (SEQ ID NO: 36), NGGAgtrngn (SEQ ID NO: 42), NTGAgtrngn (SEQ ID NO: 48), AAGAgtrngn (SEQ ID NO: 31), ACGAgtrngn (SEQ ID NO: 37), AGGAgtrngn (SEQ ID NO: 43), ATGAgtrngn (SEQ ID NO: 49), CAGAgtrngn (SEQ ID NO: 32), CCGAgtrngn (SEQ ID NO: 38), CGGAgtrngn (SEQ ID NO: 44), CTGAgtrngn (SEQ ID NO: 50), GAGAgtrngn (SEQ ID NO: 33), GCGAgtrngn (SEQ ID NO: 39), GGGAgtrngn (SEQ ID NO: 45), GTGAgtrngn (SEQ ID NO: 51), TAGAgtrngn (SEQ ID NO: 34), TCGAgtrngn (SEQ ID NO: 40), TGGAgtrngn (SEQ ID NO: 46) and TTGAgtrngn (SEQ ID NO: 52), wherein r is adenine or guanine and n or N is any nucleotide.

[0456] In various embodiments of the aspects and embodiments described herein, the iREMS comprises a DNA sequence NNGAgtragt (SEQ ID NO: 3862), wherein r is adenine or guanine and N is any nucleotide. In a specific embodiment, the DNA sequence NNGAgtragt (SEQ ID NO: 3862) is selected from the group consisting of ANGAgtragt (SEQ ID NO: 437), CNGAgtragt (SEQ ID NO: 443), GNGAgtragt (SEQ ID NO: 449), TNGAgtragt (SEQ ID NO: 455), NAGAgtragt (SEQ ID NO: 438), NCGAgtragt (SEQ ID NO: 444), NGGAgtragt (SEQ ID NO: 450), NTGAgtragt (SEQ ID NO: 456), AAGAgtragt (SEQ ID NO: 439), ACGAgtragt (SEQ ID NO: 445), AGGAgtragt (SEQ ID NO: 451), ATGAgtragt (SEQ ID NO: 457), CAGAgtragt (SEQ ID NO: 440), CCGAgtragt (SEQ ID NO: 446), CGGAgtragt (SEQ ID NO: 452), CTGAgtragt (SEQ ID NO: 458), GAGAgtragt (SEQ ID NO: 441), GCGAgtragt (SEQ ID NO: 447), GGGAgtragt (SEQ ID NO: 453), GTGAgtragt (SEQ ID NO: 459), TAGAgtragt (SEQ ID NO: 442), TCGAgtragt (SEQ ID NO: 448), TGGAgtragt (SEQ ID NO: 454) and TTGAgtragt (SEQ ID NO: 460), wherein r is adenine or guanine, and N is any nucleotide.

### BRIEF DESCRIPTION OF THE DRAWINGS

[0457] FIGS. 1A-1C. Representative schematics of intronic exon splicing mediated by an intronic REMS, where 5′ss represents a 5′ splice site, 3′ss represents a 3′ splice site and BP represents a splicing branch point. Exon 1e and Exon 2e represent extended exons. iExon 1a represents an intronic exon. Splicing events mediated by an intronic REMS in the absence of a compound described herein are illustrated by solid lines, splicing events mediated by an intronic REMS in the presence of a compound described herein are illustrated by dashed lines.

[0458] FIGS. 2A-2D, 3, 4, 5, 6A. The dose dependent production of iExons for certain genes (as specified in the figures) in the presence of certain compounds or control (DMSO) are shown, each of which represent aspects of the operation of an intronic REMS and compounds as described herein. Compounds used in the experiments depicted in FIGS. 3, 4, 5, and 6A are described herein. Compound 774 was used for the experiments depicted in FIGS. 2A-2D.

[0459] FIGS. 6B and 6C. FIG. 6B illustrates the production of exon isoforms with control (DMSO). FIG. 6C illustrates the production of certain intronic Exon isoforms for ELMO2 in the presence of a compound described herein, each of which represent aspects of the interactions of an intronic REMS, one or more branch points, one or more 3′ splice sites and compounds as described herein.

### DETAILED DESCRIPTION

### Intronic Recognition Element for Splicing Modifier (Rems)

[0460] In one aspect, provided herein is an intronic recognition element for splicing modifier (otherwise referred to as “iREMS”) recognized by a small molecule splicing modifier, whereby elements of the associated iREMS complex affect interactions with the spliceosome as further described herein. In a specific embodiment, the intronic REMS has the nucleotide sequence GAgurngn (SEQ ID NO: 2) at the RNA level, wherein r is A or G (i.e., a purine nucleotide adenine or guanine) and n is any nucleotide. In another specific embodiment, the intronic REMS has the nucleotide sequence GAguragu (SEQ ID NO: 3866) at the RNA level, wherein r is adenine or guanine. In one or more of such specific embodiments provided herein, n is adenine or guanine. In a more specific embodiment, the intronic REMS has the nucleotide sequence NNGAgurngn (SEQ ID NO: 1) at the RNA level, wherein r is A or G (i.e., a purine nucleotide adenine or guanine) and n or N is any nucleotide. In another more specific embodiment, the intronic REMS has the nucleotide sequence NNGAguragu (SEQ ID NO: 3862) at the RNA level, wherein r is adenine or guanine and N is any nucleotide. In one or more of such more specific embodiments provided herein, N is adenine or guanine.

[0461] In another specific embodiment, the intronic REMS is downstream of an intronic branch point and a functional intronic 3′ splice site, wherein the intronic REMS comprises a nucleotide sequence selected from the group consisting of ANGAgurngn (SEQ ID NO: 29), CNGAgurngn (SEQ ID NO: 35), GNGAgurngn (SEQ ID NO: 41), UNGAgurngn (SEQ ID NO: 47), NAGAgurngn (SEQ ID NO: 30), NCGAgurngn (SEQ ID NO: 36), NGGAgurngn (SEQ ID NO: 42), NUGAgurngn (SEQ ID NO: 48), AAGAgurngn (SEQ ID NO: 31), ACGAgurngn (SEQ ID NO: 37), AGGAgurngn (SEQ ID NO: 43), AUGAgurngn (SEQ ID NO: 49), CAGAgurngn (SEQ ID NO: 32), CCGAgurngn (SEQ ID NO: 38), CGGAgurngn (SEQ ID NO: 44), CUGAgurngn (SEQ ID NO: 50), GAGAgurngn (SEQ ID NO: 33), GCGAgurngn (SEQ ID NO: 39), GGGAgurngn (SEQ ID NO: 45), GUGAgurngn (SEQ ID NO: 51), UAGAgurngn (SEQ ID NO: 34), UCGAgurngn (SEQ ID NO: 40), UGGAgurngn (SEQ ID NO: 46) and UUGAgurngn (SEQ ID NO: 52) at the RNA level, wherein r is A or G (i.e., a purine nucleotide adenine or guanine) and n or N is any nucleotide, by which the intronic REMS, in the presence of a compound described herein, functions as an intronic 5′ splice site, causing the NNGA (SEQ ID NO: 3863) nucleotides of the REMS and the intronic nucleotide sequence between the intronic 3′ splice site down to and including the NNGA (SEQ ID NO: 3863) nucleotides to be spliced into the mature RNA as an intronic exon to provide a non-wild-type, nonfunctional mRNA.

[0462] In a preferred embodiment, the REMS has a nucleotide sequence selected from the group consisting of ANGAguragu (SEQ ID NO: 437), CNGAguragu (SEQ ID NO: 443), GNGAguragu (SEQ ID NO: 449), UNGAguragu (SEQ ID NO: 455), NAGAguragu (SEQ ID NO: 438), NCGAguragu (SEQ ID NO: 444), NGGAguragu (SEQ ID NO: 450), NUGAguragu (SEQ ID NO: 456), AAGAguragu (SEQ ID NO: 439), ACGAguragu (SEQ ID NO: 445), AGGAguragu (SEQ ID NO: 451), AUGAguragu (SEQ ID NO: 457), CAGAguragu (SEQ ID NO: 440), CCGAguragu (SEQ ID NO: 446), CGGAguragu (SEQ ID NO: 452), CUGAguragu (SEQ ID NO: 458), GAGAguragu (SEQ ID NO: 441), GCGAguragu (SEQ ID NO: 447), GGGAguragu (SEQ ID NO: 453), GUGAguragu (SEQ ID NO: 459), UAGAguragu (SEQ ID NO: 442), UCGAguragu (SEQ ID NO: 448), UGGAguragu (SEQ ID NO: 454) and UUGAguragu (SEQ ID NO: 460) at the RNA level, wherein r is A or G (i.e., a purine nucleotide adenine or guanine) and N is any nucleotide. In one or more embodiments provided herein, N is A or G.

[0463] In the context of DNA, in a specific embodiment, the nucleotide sequence encoding an intronic REMS has the sequence GAgtrngn (SEQ ID NO: 4), wherein r is A or G (i.e., a purine nucleotide adenine or guanine) and n is any nucleotide. In another specific embodiment, in the context of DNA, the nucleotide sequence encoding an intronic REMS has the sequence GAgtragt (SEQ ID NO: 3865), wherein r is A or G. In a specific embodiment, in the context of DNA, the nucleotide sequence encoding an intronic REMS has the sequence NNGAgtrngn (SEQ ID NO: 3), wherein r is A or G (i.e., a purine nucleotide adenine or guanine) and n or N is any nucleotide. In another specific embodiment, in the context of DNA, the nucleotide sequence encoding an intronic REMS has the sequence NNGAgtragt (SEQ ID NO: 3864), wherein r is A or G and N is any nucleotide.

[0464] In a specific embodiment, in the context of DNA, the nucleotide sequence encoding an intronic REMS comprises a sequence selected from the group consisting of ANGAgtrngn (SEQ ID NO: 1829), CNGAgtrngn (SEQ ID NO: 1835), GNGAgtrngn (SEQ ID NO: 1841), TNGAgtrngn (SEQ ID NO: 1847), NAGAgtrngn (SEQ ID NO: 1830), NCGAgtrngn (SEQ ID NO: 1836), NGGAgtrngn (SEQ ID NO: 1842), NTGAgtrngn (SEQ ID NO: 1848), AAGAgtrngn (SEQ ID NO: 1831), ACGAgtrngn (SEQ ID NO: 1837), AGGAgtrngn (SEQ ID NO: 1843), ATGAgtrngn (SEQ ID NO: 1849), CAGAgtrngn (SEQ ID NO: 1832), CCGAgtrngn (SEQ ID NO: 1838), CGGAgtrngn (SEQ ID NO: 1844), CTGAgtrngn (SEQ ID NO: 1850), GAGAgtrngn (SEQ ID NO: 1833), GCGAgtrngn (SEQ ID NO: 1839), GGGAgtrngn (SEQ ID NO: 1845), GTGAgtrngn (SEQ ID NO: 1851), TAGAgtrngn (SEQ ID NO: 1834), TCGAgtrngn (SEQ ID NO: 1840), TGGAgtrngn (SEQ ID NO: 1846) and TTGAgtrngn (SEQ ID NO: 1852), wherein r is A or G (i.e., a purine nucleotide adenine or guanine) and n or N is any nucleotide.

[0465] In a preferred embodiment, in the context of DNA, the nucleotide sequence encoding the intronic REMS comprises a sequence selected from the group consisting of ANGAgtragt (SEQ ID NO: 2237), CNGAgtragt (SEQ ID NO: 2243), GNGAgtragt (SEQ ID NO: 2249), TNGAgtragt (SEQ ID NO: 2255), NAGAgtragt (SEQ ID NO: 2238), NCGAgtragt (SEQ ID NO: 2244), NGGAgtragt (SEQ ID NO: 2250), NTGAgtragt (SEQ ID NO: 2256), AAGAgtragt (SEQ ID NO: 2239), ACGAgtragt (SEQ ID NO: 2245), AGGAgtragt (SEQ ID NO: 2251), ATGAgtragt (SEQ ID NO: 2257), CAGAgtragt (SEQ ID NO: 2240), CCGAgtragt (SEQ ID NO: 2246), CGGAgtragt (SEQ ID NO: 2252), CTGAgtragt (SEQ ID NO: 2258), GAGAgtragt (SEQ ID NO: 2241), GCGAgtragt (SEQ ID NO: 2247), GGGAgtragt (SEQ ID NO: 2253), GTGAgtragt (SEQ ID NO: 2259), TAGAgtragt (SEQ ID NO: 2242), TCGAgtragt (SEQ ID NO: 2248), TGGAgtragt (SEQ ID NO: 2254) and TTGAgtragt (SEQ ID NO: 2260), wherein r is A or G and N is any nucleotide. In one or more embodiments provided herein, N is A or G.

[0466] An intronic REMS can be part of an endogenous RNA or can be introduced into an RNA sequence that does not naturally contain the intronic REMS sequence (in which case, the introduced intronic REMS is a non-endogenous intronic REMS, i.e., an intronic REMS not naturally present in the corresponding RNA. A nucleotide sequence encoding an intronic REMS can also be part of an endogenous DNA sequence, or a nucleotide sequence encoding the intronic REMS can be introduced into a DNA sequence that does not naturally contain the nucleotide sequence encoding an intronic REMS.

[0467] In a specific embodiment, the intronic REMS is located in an intron which further comprises is downstream of a branch point and a functional 3′ splice site which, in the presence of a small molecule splicing modifier, enables the REMS to function as a 5′ splice site. In a specific embodiment, the intronic REMS is located in an intron and is downstream of a branch point and a functional 3′ splice site which, in the presence of a small molecule splicing modifier, enables the REMS to function as a 5′ splice site. Without being bound by any theory or mechanism, the small molecule compounds described herein have been shown to increase the affinity of the interaction between the U1 snRNP, as well as other components of the pre-mRNA splicing machinery, and the nucleotides NNGA (SEQ ID NO: 3863) of the REMS whereby, in the presence of the compound, the intronic REMS functions as a U1 snRNP binding site, causing the intronic nucleotides to be spliced as an intronic exon.

### Compounds

[0468] Provided herein are compounds of Formula (I) for use in the methods described herein:

[chemical structure]

[0469] or a form thereof, wherein:

[0470] w₁ and w₅ are independently C—Rₐ or N;

[0471] w₂ is C—R_{b} or N;

[0472] w₃, w₄ and w₇ are independently C—R₁, C—R₂, C—Rₐ or N;

[0473] w₆ is C—R₁, C—R₂, C—R_{c} or N;

[0474] wherein one of w₃, w₄, w₆ and w₇ is C—R₁and one other of w₃, w₄, w₆ and w₇ is C—R₂, provided that,

[0475] when w₃ is C—R₁, then w₆ is C—R₂ and w₄ and w₇ are independently C—Rₐ or N; or,

[0476] when w₃ is C—R₂, then w₆ is C—R₁and w₄ and w₇ are independently C—Rₐ or N; or,

[0477] when w₄ is C—R₁, then w₇ is C—R₂ and w₃ is C—Rₐ or N and w₆ is C—R_{c} or N; or,

[0478] when w₄ is C—R₂, then w₇ is C—R₁and w₃ is C—Rₐ or N and w₆ is C—R_{c} or N; and,

[0479] wherein any one, two or three of w₁, w₂, w₃, w₄, w₅, w₆ and w₇ may optionally be N;

[0480] R₁ is C₁₋₈alkyl, amino, C₁₋₈alkyl-amino, (C₁₋₈alkyl)₂-amino, C₁₋₈alkoxy-C₁₋₈alkyl-amino, (C₁₋₈alkoxy-C₁₋₈alkyl)₂-amino, (C₁₋₈alkoxy-C₁₋₈alkyl)(C₁₋₈alkyl)amino, amino-C₁₋₈alkyl, C₁₋₈alkyl-amino-C₁₋₈alkyl, (C₁₋₈alkyl)₂-amino-C₁₋₈alkyl, C₁₋₈alkoxy-C₁₋₈alkyl-amino-C₁₋₈alkyl, (C₁₋₈alkoxy-C₁₋₈alkyl)₂-amino-C₁₋₈alkyl, (C₁₋₈alkoxy-C₁₋₈alkyl)(C₁₋₈alkyl)amino-C₁₋₈alkyl, amino-C₁₋₈alkyl-amino, (amino-C₁₋₈alkyl)₂-amino, (amino-C₁₋₈alkyl)(C₁₋₈alkyl)amino, C₁₋₈alkyl-amino-C₁₋₈alkyl-amino, (C₁₋₈alkyl-amino-C₁₋₈alkyl)₂-amino, (C₁₋₈alkyl-amino-C₁₋₈alkyl)(C₁₋₈alkyl)amino, (C₁₋₈alkyl)₂-amino-C₁₋₈alkyl-amino, [(C₁₋₈alkyl)₂-amino-C₁₋₈alkyl](C₁₋₈alkyl)amino, amino-C₁₋₈alkoxy, C₁₋₈alkyl-amino-C₁₋₈alkoxy, (C₁₋₈alkyl)₂-amino-C₁₋₈alkoxy, C₁₋₈alkoxy-C₁₋₈alkyl-amino-C₁₋₈alkoxy, C₁₋₈alkoxy-C₁₋₈alkyl-amino-C₁₋₈alkoxy, (C₁₋₈alkoxy-C₁₋₈alkyl)(C₁₋₈alkyl)amino-C₁₋₈alkoxy, amino-C₂₋₈alkenyl, C₁₋₈alkyl-amino-C₂₋₈alkenyl, (C₁₋₈alkyl)₂-amino-C₂₋₈alkenyl, amino-C₂₋₈alkynyl, C₁₋₈alkyl-amino-C₂₋₈alkynyl, (C₁₋₈alkyl)₂-amino-C₂₋₈alkynyl, halo-C₁₋₈alkyl-amino, (halo-C₁₋₈alkyl)₂-amino, (halo-C₁₋₈alkyl)(C₁₋₈alkyl)amino, hydroxy-C₁₋₈alkyl, hydroxy-C₁₋₈alkoxy-C₁₋₈alkyl, hydroxy-C₁₋₈alkyl-amino, (hydroxy-C₁₋₈alkyl)₂-amino, (hydroxy-C₁₋₈alkyl)(C₁₋₈alkyl)amino, hydroxy-C₁₋₈alkyl-amino-C₁₋₈alkyl, (hydroxy-C₁₋₈alkyl)₂-amino-C₁₋₈alkyl, (hydroxy-C₁₋₈alkyl)(C₁₋₈alkyl)amino-C₁₋₈alkyl, hydroxy-C₁₋₈alkyl-amino-C₁₋₈alkoxy, (hydroxy-C₁₋₈alkyl)₂-amino-C₁₋₈alkoxy, (hydroxy-C₁₋₈alkyl)(C₁₋₈alkyl)amino-C₁₋₈alkoxy, hydroxy-C₁₋₈alkyl-amino-C₁₋₈alkyl-amino, (hydroxy-C₁₋₈alkyl-amino-C₁₋₈alkyl)₂-amino, (hydroxy-C₁₋₈alkyl)₂-amino-C₁₋₈alkyl-amino, (hydroxy-C₁₋₈alkyl-amino-C₁₋₈alkyl)(C₁₋₈alkyl)amino, (hydroxy-C₁₋₈alkyl)(C₁₋₈alkyl)amino-C₁₋₈alkyl-amino, [(hydroxy-C₁₋₈alkyl)₂-amino-C₁₋₈alkyl](C₁₋₈alkyl)amino, [(hydroxy-C₁₋₈alkyl)(C₁₋₈alkyl)amino-C₁₋₈alkyl](C₁₋₈alkyl)amino, heterocyclyl, heterocyclyl-C₁₋₈alkyl, heterocyclyl-C₁₋₈alkoxy, heterocyclyl-amino, (heterocyclyl)C₁₋₈alkyl)amino, heterocyclyl-amino-C₁₋₈alkyl, heterocyclyl-C₁₋₈alkyl-amino, (heterocyclyl-C₁₋₈alkyl)₂-amino, (heterocyclyl-C₁₋₈alkyl)(C₁₋₈alkyl)amino, heterocyclyl-C₁₋₈alkyl-amino-C₁₋₈alkyl, (heterocyclyl-C₁₋₈alkyl)₂-amino-C₁₋₈alkyl, (heterocyclyl-C₁₋₈alkyl)(C₁₋₈alkyl)amino-C₁₋₈alkyl, heterocyclyl-oxy, heterocyclyl-carbonyl, heterocyclyl-carbonyl-oxy, C₃₋₁₄cycloalkyl, aryl-C₁₋₈alkyl-amino, (aryl-C₁₋₈alkyl)₂-amino, (aryl-C₁₋₈alkyl)(C₁₋₈alkyl)amino, aryl-C₁₋₈alkyl-amino-C₁₋₈alkyl, (aryl-C₁₋₈alkyl)₂-amino-C₁₋₈alkyl, (aryl-C₁₋₈alkyl)(C₁₋₈alkyl)amino-C₁₋₈alkyl, heteroaryl, heteroaryl-C₁₋₈alkyl, heteroaryl-C₁₋₈alkoxy, heteroaryl-amino, heteroaryl-C₁₋₈alkyl-amino, (heteroaryl-C₁₋₈alkyl)₂-amino, (heteroaryl-C₁₋₈alkyl)(C₁₋₈alkyl)amino, heteroaryl-C₁₋₈alkyl-amino-C₁₋₈alkyl, (heteroaryl-C₁₋₈alkyl)₂-amino-C₁₋₈alkyl or (heteroaryl-C₁₋₈alkyl)(C₁₋₈alkyl)amino-C₁₋₈alkyl;

[0481] wherein, each instance of heterocyclyl, C₃₋₁₄cycloalkyl, aryl and heteroaryl is optionally substituted with one, two or three R₃ substituents and optionally, with one additional R₄ substituent; or,

[0482] wherein, each instance of heterocyclyl, C₃₋₁₄cycloalkyl, aryl and heteroaryl is optionally substituted with one, two, three or four R₃ substituents;

[0483] R₂ is aryl, aryl-amino, aryl-amino-carbonyl, heterocyclyl, heteroaryl or heteroaryl-amino;

[0484] wherein, each instance of aryl, heterocyclyl and heteroaryl is optionally substituted with one, two or three R₆ substituents and optionally, with one additional R₇ substituent;

[0485] Rₐ is, in each instance, independently selected from hydrogen, halogen, C₁₋₈alkyl or deuterium;

[0486] R_{b} is hydrogen, halogen, C₁₋₈alkyl, C₁₋₈alkoxy or deuterium;

[0487] R_{c} is hydrogen, halogen, C₁₋₈alkyl or deuterium;

[0488] R₃ is, in each instance, independently selected from cyano, halogen, hydroxy, oxo, C₁₋₈alkyl, halo-C₁₋₈alkyl, C₁₋₈alkyl-carbonyl, C₁₋₈alkoxy, halo-C₁₋₈alkoxy, C₁₋₈alkoxy-C₁₋₈alkyl, C₁₋₈alkoxy-carbonyl, amino, C₁₋₈alkyl-amino, (C₁₋₈alkyl)₂-amino, amino-C₁₋₈alkyl, C₁₋₈alkyl-amino-C₁₋₈alkyl, (C₁₋₈alkyl)₂-amino-C₁₋₈alkyl, amino-C₁₋₈alkyl-amino, C₁₋₈alkyl-amino-C₁₋₈alkyl-amino, (C₁₋₈alkyl-amino-C₁₋₈alkyl)₂-amino, (C₁₋₈alkyl)₂-amino-C₁₋₈alkyl-amino, [(C₁₋₈alkyl)₂-amino-C₁₋₈alkyl]₂-amino, (C₁₋₈alkyl-amino-C₁₋₈alkyl)(C₁₋₈alkyl)amino, [(C₁₋₈alkyl)₂-amino-C₁₋₈alkyl](C₁₋₈alkyl)amino, C₁₋₈alkoxy-C₁₋₈alkyl-amino, (C₁₋₈alkoxy-C₁₋₈alkyl)₂-amino, (C₁₋₈alkoxy-C₁₋₈alkyl)(C₁₋₈alkyl)amino, C₁₋₈alkyl-carbonyl-amino, C₁₋₈alkoxy-carbonyl-amino, hydroxy-C₁₋₈alkyl, hydroxy-C₁₋₈alkoxy-C₁₋₈alkyl, hydroxy-C₁₋₈alkyl-amino, (hydroxy-C₁₋₈alkyl)₂-amino or (hydroxy-C₁₋₈alkyl)(C₁₋₈alkyl)amino;

[0489] R₄ is C₃₋₁₄cycloalkyl, C₃₋₁₄cycloalkyl-C₁₋₈alkyl, C₃₋₁₄cycloalkyl-amino, aryl-C₁₋₈alkyl, aryl-C₁₋₈alkoxy-carbonyl, aryl-sulfonyloxy-C₁₋₈alkyl, heterocyclyl or heterocyclyl-C₁₋₈alkyl;

[0490] wherein, each instance of C₃₋₁₄cycloalkyl, aryl and heterocyclyl is optionally substituted with one, two or three R₅ substituents;

[0491] R₅ is, in each instance, independently selected from halogen, hydroxy, cyano, nitro, C₁₋₈alkyl, halo-C₁₋₈alkyl, C₁₋₈alkoxy, halo-C₁₋₈alkoxy, amino, C₁₋₈alkyl-amino, (C₁₋₈alkyl)₂-amino or C₁₋₈alkyl-thio;

[0492] R₆ is, in each instance, independently selected from halogen, hydroxy, cyano, nitro, C₁₋₈alkyl, C₂₋₈alkenyl, halo-C₁₋₈alkyl, hydroxy-C₁₋₈alkyl, C₁₋₈alkoxy, halo-C₁₋₈alkoxy, C₁₋₈alkoxy-C₁₋₈alkyl, amino, C₁₋₈alkyl-amino, (C₁₋₈alkyl)₂-amino or C₁₋₈alkyl-thio; and,

[0493] R₇ is C₃₋₁₄cycloalkyl, C₃₋₁₄cycloalkyl-oxy, aryl, heterocyclyl or heteroaryl.

[0494] In one embodiment of the use of a compound of Formula (I), w₁ is C—Rₐ.

[0495] In another embodiment of the use of a compound of Formula (I), w₁ is N.

[0496] In one embodiment of the use of a compound of Formula (I), w₂ is C—R_{b}.

[0497] In another embodiment of the use of a compound of Formula (I), w₂ is N.

[0498] In one embodiment of the use of a compound of Formula (I), w₃ is C—Rₐ.

[0499] In another embodiment of the use of a compound of Formula (I), w₃ is N.

[0500] In one embodiment of the use of a compound of Formula (I), w₄ is C—Rₐ.

[0501] In another embodiment of the use of a compound of Formula (I), w₄ is N.

[0502] In one embodiment of the use of a compound of Formula (I), w₅ is C—Rₐ.

[0503] In another embodiment of the use of a compound of Formula (I), w₅ is N.

[0504] In one embodiment of the use of a compound of Formula (I), w₆ is C—R_{c}.

[0505] In another embodiment of the use of a compound of Formula (I), w₆ is N.

[0506] In one embodiment of the use of a compound of Formula (I), w₇ is C—Rₐ.

[0507] In another embodiment of the use of a compound of Formula (I), w₇ is N.

[0508] In one embodiment of the use of a compound of Formula (I), w₃ is C—R₁and w₆ is C—R₂.

[0509] In another embodiment of the use of a compound of Formula (I), w₃ is C—R₂ and w₆ is C—R₁.

[0510] In one embodiment of the use of a compound of Formula (I), w₄ is C—R₁and w₇ is C—R₂.

[0511] In another embodiment of the use of a compound of Formula (I), w₄ is C—R₂ and w₇ is C—R₁.

[0512] In one embodiment of the use of a compound of Formula (I), w₃ is C—R₁, w₆ is C—R₂ and w₁, w₄, w₅ and w₇ are independently C—Rₐ or N and w₂ is C—R_{b} or N.

[0513] In another embodiment of the use of a compound of Formula (I), w₃ is C—R₂, w₆ is C—R₁and w₁, w₄, w₅ and w₇ are independently C—Rₐ or N and w₂ is C—R_{b} or N.

[0514] In one embodiment of the use of a compound of Formula (I), w₄ is C—R₁, w₇ is C—R₂, w₁, w₃ and w₅ are independently C—Rₐ or N, w₂ is C—R_{b} or N and w₆ is C—R_{c} or N.

[0515] In another embodiment of the use of a compound of Formula (I), w₄ is C—R₂, w₇ is C—R₁, w₁, w₃ and w₅ are independently C—Rₐ or N, w₂ is C—R_{b} or N and w₆ is C—R_{c} or N.

[0516] In one embodiment of the use of a compound of Formula (I), w₁ and w₂ are N.

[0517] In one embodiment of the use of a compound of Formula (I), w₁ and w₃ are N.

[0518] In one embodiment of the use of a compound of Formula (I), w₁ and w₄ are N.

[0519] In one embodiment of the use of a compound of Formula (I), w₁ and w₅ are N.

[0520] In one embodiment of the use of a compound of Formula (I), w₁ and w₆ are N.

[0521] In one embodiment of the use of a compound of Formula (I), w₁ and w₇ are N.

[0522] In one embodiment of the use of a compound of Formula (I),

[0523] R₁ is C₁₋₈alkyl, amino, C₁₋₈alkyl-amino, (C₁₋₈alkyl)₂-amino, C₁₋₈alkoxy-C₁₋₈alkyl-amino, (C₁₋₈alkoxy-C₁₋₈alkyl)₂-amino, (C₁₋₈alkoxy-C₁₋₈alkyl)(C₁₋₈alkyl)amino, amino-C₁₋₈alkyl, C₁₋₈alkyl-amino-C₁₋₈alkyl, (C₁₋₈alkyl)₂-amino-C₁₋₈alkyl, C₁₋₈alkoxy-C₁₋₈alkyl-amino-C₁₋₈alkyl, (C₁₋₈alkoxy-C₁₋₈alkyl)₂-amino-C₁₋₈alkyl, (C₁₋₈alkoxy-C₁₋₈alkyl)(C₁₋₈alkyl)amino-C₁₋₈alkyl, amino-C₁₋₈alkyl-amino, (amino-C₁₋₈alkyl)₂-amino, (amino-C₁₋₈alkyl)(C₁₋₈alkyl)amino, C₁₋₈alkyl-amino-C₁₋₈alkyl-amino, (C₁₋₈alkyl-amino-C₁₋₈alkyl)₂-amino, (C₁₋₈alkyl-amino-C₁₋₈alkyl)(C₁₋₈alkyl)amino, (C₁₋₈alkyl)₂-amino-C₁₋₈alkyl-amino, [(C₁₋₈alkyl)₂-amino-C₁₋₈alkyl](C₁₋₈alkyl)amino, amino-C₁₋₈alkoxy, C₁₋₈alkyl-amino-C₁₋₈alkoxy, (C₁₋₈alkyl)₂-amino-C₁₋₈alkoxy, C₁₋₈alkoxy-C₁₋₈alkyl-amino-C₁₋₈alkoxy, (C₁₋₈alkoxy-C₁₋₈alkyl)₂-amino-C₁₋₈alkoxy, (C₁₋₈alkoxy-C₁₋₈alkyl)(C₁₋₈alkyl)amino-C₁₋₈alkoxy, amino-C₂₋₈alkenyl, C₁₋₈alkyl-amino-C₂₋₈alkenyl, (C₁₋₈alkyl)₂-amino-C₂₋₈alkenyl, amino-C₂₋₈alkynyl, C₁₋₈alkyl-amino-C₂₋₈alkynyl, (C₁₋₈alkyl)₂-amino-C₂₋₈alkynyl, halo-C₁₋₈alkyl-amino, (halo-C₁₋₈alkyl)₂-amino, (halo-C₁₋₈alkyl)(C₁₋₈alkyl)amino, hydroxy-C₁₋₈alkyl, hydroxy-C₁₋₈alkoxy-C₁₋₈alkyl, hydroxy-C₁₋₈alkyl-amino, (hydroxy-C₁₋₈alkyl)₂-amino, (hydroxy-C₁₋₈alkyl)(C₁₋₈alkyl)amino, hydroxy-C₁₋₈alkyl-amino-C₁₋₈alkyl, (hydroxy-C₁₋₈alkyl)₂-amino-C₁₋₈alkyl, (hydroxy-C₁₋₈alkyl)(C₁₋₈alkyl)amino-C₁₋₈alkyl, hydroxy-C₁₋₈alkyl-amino-C₁₋₈alkoxy, (hydroxy-C₁₋₈alkyl)₂-amino-C₁₋₈alkoxy, (hydroxy-C₁₋₈alkyl)(C₁₋₈alkyl)amino-C₁₋₈alkoxy, hydroxy-C₁₋₈alkyl-amino-C₁₋₈alkyl-amino, (hydroxy-C₁₋₈alkyl-amino-C₁₋₈alkyl)₂-amino, (hydroxy-C₁₋₈alkyl)₂-amino-C₁₋₈alkyl-amino, (hydroxy-C₁₋₈alkyl-amino-C₁₋₈alkyl)(C₁₋₈alkyl)amino, (hydroxy-C₁₋₈alkyl)(C₁₋₈alkyl)amino-C₁₋₈alkyl-amino, [(hydroxy-C₁₋₈alkyl)₂-amino-C₁₋₈alkyl](C₁₋₈alkyl)amino, [(hydroxy-C₁₋₈alkyl)(C₁₋₈alkyl)amino-C₁₋₈alkyl](C₁₋₈alkyl)amino, heterocyclyl, heterocyclyl-C₁₋₈alkyl, heterocyclyl-C₁₋₈alkoxy, heterocyclyl-amino, (heterocyclyl)(C₁₋₈alkyl)amino, heterocyclyl-amino-C₁₋₈alkyl, heterocyclyl-C₁₋₈alkyl-amino, (heterocyclyl-C₁₋₈alkyl)₂-amino, (heterocyclyl-C₁₋₈alkyl)(C₁₋₈alkyl)amino, heterocyclyl-C₁₋₈alkyl-amino-C₁₋₈alkyl, (heterocyclyl-C₁₋₈alkyl)₂-amino-C₁₋₈alkyl, (heterocyclyl-C₁₋₈alkyl)(C₁₋₈alkyl)amino-C₁₋₈alkyl, heterocyclyl-oxy, heterocyclyl-carbonyl, heterocyclyl-carbonyl-oxy, C₃₋₁₄cycloalkyl, aryl-C₁₋₈alkyl-amino, (aryl-C₁₋₈alkyl)₂-amino, (aryl-C₁₋₈alkyl)(C₁₋₈alkyl)amino, aryl-C₁₋₈alkyl-amino-C₁₋₈alkyl, (aryl-C₁₋₈alkyl)₂-amino-C₁₋₈alkyl, (aryl-C₁₋₈alkyl)(C₁₋₈alkyl)amino-C₁₋₈alkyl, heteroaryl, heteroaryl-C₁₋₈alkyl, heteroaryl-C₁₋₈alkoxy, heteroaryl-amino, heteroaryl-C₁₋₈alkyl-amino, (heteroaryl-C₁₋₈alkyl)₂-amino, (heteroaryl-C₁₋₈alkyl)(C₁₋₈alkyl)amino, heteroaryl-C₁₋₈alkyl-amino-C₁₋₈alkyl, (heteroaryl-C₁₋₈alkyl)₂-amino-C₁₋₈alkyl or (heteroaryl-C₁₋₈alkyl)(C₁₋₈alkyl)amino-C₁₋₈alkyl; wherein, each instance of heterocyclyl, C₃₋₁₄cycloalkyl, aryl and heteroaryl is optionally substituted with R₃ and R₄ substituents.

[0524] In another embodiment of the use of a compound of Formula (I),

[0525] R₁ is amino, (C₁₋₈alkyl)₂-amino, C₁₋₈alkoxy-C₁₋₈alkyl-amino, (C₁₋₈alkoxy-C₁₋₈alkyl)₂-amino, amino-C₁₋₈alkyl, C₁₋₈alkyl-amino-C₁₋₈alkyl, (C₁₋₈alkyl)₂-amino-C₁₋₈alkyl, C₁₋₈alkoxy-C₁₋₈alkyl-amino-C₁₋₈alkyl, (C₁₋₈alkoxy-C₁₋₈alkyl)₂-amino-C₁₋₈alkyl, (C₁₋₈alkoxy-C₁₋₈alkyl)(C₁₋₈alkyl)amino-C₁₋₈alkyl, amino-C₁₋₈alkyl-amino, (amino-C₁₋₈alkyl)₂-amino, (amino-C₁₋₈alkyl)(C₁₋₈alkyl)amino, C₁₋₈alkyl-amino-C₁₋₈alkyl-amino, (C₁₋₈alkyl-amino-C₁₋₈alkyl)₂-amino, (C₁₋₈alkyl-amino-C₁₋₈alkyl)(C₁₋₈alkyl)amino, (C₁₋₈alkyl)₂-amino-C₁₋₈alkyl-amino, [(C₁₋₈alkyl)₂-amino-C₁₋₈alkyl](C₁₋₈alkyl)amino, amino-C₁₋₈alkoxy, C₁₋₈alkyl-amino-C₁₋₈alkoxy, (C₁₋₈alkyl)₂-amino-C₁₋₈alkoxy, C₁₋₈alkoxy-C₁₋₈alkyl-amino-C₁₋₈alkoxy, (C₁₋₈alkoxy-C₁₋₈alkyl)₂-amino-C₁₋₈alkoxy, (C₁₋₈alkoxy-C₁₋₈alkyl)(C₁₋₈alkyl)amino-C₁₋₈alkoxy, amino-C₂₋₈alkenyl, C₁₋₈alkyl-amino-C₂₋₈alkenyl, (C₁₋₈alkyl)₂-amino-C₂₋₈alkenyl, amino-C₂₋₈alkynyl, C₁₋₈alkyl-amino-C₂₋₈alkynyl, (C₁₋₈alkyl)₂-amino-C₂₋₈alkynyl, halo-C₁₋₈alkyl-amino, (halo-C₁₋₈alkyl)₂-amino, (halo-C₁₋₈alkyl)(C₁₋₈alkyl)amino, hydroxy-C₁₋₈alkyl, hydroxy-C₁₋₈alkoxy-C₁₋₈alkyl, hydroxy-C₁₋₈alkyl-amino, (hydroxy-C₁₋₈alkyl)₂-amino, (hydroxy-C₁₋₈alkyl)(C₁₋₈alkyl)amino, hydroxy-C₁₋₈alkyl-amino-C₁₋₈alkyl, (hydroxy-C₁₋₈alkyl)₂-amino-C₁₋₈alkyl, (hydroxy-C₁₋₈alkyl)(C₁₋₈alkyl)amino-C₁₋₈alkyl, hydroxy-C₁₋₈alkyl-amino-C₁₋₈alkoxy, (hydroxy-C₁₋₈alkyl)₂-amino-C₁₋₈alkoxy, (hydroxy-C₁₋₈alkyl)(C₁₋₈alkyl)amino-C₁₋₈alkoxy, hydroxy-C₁₋₈alkyl-amino-C₁₋₈alkyl-amino, (hydroxy-C₁₋₈alkyl-amino-C₁₋₈alkyl)₂-amino, (hydroxy-C₁₋₈alkyl)₂-amino-C₁₋₈alkyl-amino, (hydroxy-C₁₋₈alkyl-amino-C₁₋₈alkyl)(C₁₋₈alkyl)amino, (hydroxy-C₁₋₈alkyl)(C₁₋₈alkyl)amino-C₁₋₈alkyl-amino, [(hydroxy-C₁₋₈alkyl)₂-amino-C₁₋₈alkyl](C₁₋₈alkyl)amino, [(hydroxy-C₁₋₈alkyl)(C₁₋₈alkyl)amino-C₁₋₈alkyl](C₁₋₈alkyl)amino, heterocyclyl, heterocyclyl-C₁₋₈alkyl, heterocyclyl-C₁₋₈alkoxy, heterocyclyl-amino, (heterocyclyl)(C₁₋₈alkyl)amino, heterocyclyl-amino-C₁₋₈alkyl, heterocyclyl-C₁₋₈alkyl-amino, (heterocyclyl-C₁₋₈alkyl)₂-amino, (heterocyclyl-C₁₋₈alkyl)(C₁₋₈alkyl)amino, heterocyclyl-C₁₋₈alkyl-amino-C₁₋₈alkyl, (heterocyclyl-C₁₋₈alkyl)₂-amino-C₁₋₈alkyl, (heterocyclyl-C₁₋₈alkyl)(C₁₋₈alkyl)amino-C₁₋₈alkyl, heterocyclyl-oxy, heterocyclyl-carbonyl, heterocyclyl-carbonyl-oxy, C₃₋₁₄cycloalkyl, aryl-C₁₋₈alkyl-amino, (aryl-C₁₋₈alkyl)₂-amino, (aryl-C₁₋₈alkyl)(C₁₋₈alkyl)amino, aryl-C₁₋₈alkyl-amino-C₁₋₈alkyl, (aryl-C₁₋₈alkyl)₂-amino-C₁₋₈alkyl, (aryl-C₁₋₈alkyl)(C₁₋₈alkyl)amino-C₁₋₈alkyl, heteroaryl, heteroaryl-C₁₋₈alkyl, heteroaryl-C₁₋₈alkoxy, heteroaryl-C₁₋₈alkyl-amino, (heteroaryl-C₁₋₈alkyl)₂-amino, (heteroaryl-C₁₋₈alkyl)(C₁₋₈alkyl)amino, heteroaryl-C₁₋₈alkyl-amino-C₁₋₈alkyl, (heteroaryl-C₁₋₈alkyl)₂-amino-C₁₋₈alkyl or (heteroaryl-C₁₋₈alkyl)(C₁₋₈alkyl)amino-C₁₋₈alkyl; wherein, each instance of heterocyclyl, C₃₋₁₄cycloalkyl, aryl and heteroaryl is optionally substituted with R₃ and R₄ substituents.

[0526] In another embodiment of the use of a compound of Formula (I),

[0527] R₁ is C₁₋₈alkyl, amino, C₁₋₈alkyl-amino, (C₁₋₈alkyl)₂-amino, C₁₋₈alkoxy-C₁₋₈alkyl-amino, (C₁₋₈alkoxy-C₁₋₈alkyl)₂-amino, (C₁₋₈alkoxy-C₁₋₈alkyl)(C₁₋₈alkyl)amino, amino-C₁₋₈alkyl, C₁₋₈alkyl-amino-C₁₋₈alkyl, (C₁₋₈alkyl)₂-amino-C₁₋₈alkyl, C₁₋₈alkoxy-C₁₋₈alkyl-amino-C₁₋₈alkyl, (C₁₋₈alkoxy-C₁₋₈alkyl)₂-amino-C₁₋₈alkyl, (C₁₋₈alkoxy-C₁₋₈alkyl)(C₁₋₈alkyl)amino-C₁₋₈alkyl, amino-C₁₋₈alkyl-amino, (amino-C₁₋₈alkyl)₂-amino, (amino-C₁₋₈alkyl)(C₁₋₈alkyl)amino, C₁₋₈alkyl-amino-C₁₋₈alkyl-amino, (C₁₋₈alkyl-amino-C₁₋₈alkyl)₂-amino, (C₁₋₈alkyl-amino-C₁₋₈alkyl)(C₁₋₈alkyl)amino, (C₁₋₈alkyl)₂-amino-C₁₋₈alkyl-amino, [(C₁₋₈alkyl)₂-amino-C₁₋₈alkyl](C₁₋₈alkyl)amino, amino-C₁₋₈alkoxy, C₁₋₈alkyl-amino-C₁₋₈alkoxy, (C₁₋₈alkyl)₂-amino-C₁₋₈alkoxy, C₁₋₈alkoxy-C₁₋₈alkyl-amino-C₁₋₈alkoxy, (C₁₋₈alkoxy-C₁₋₈alkyl)₂-amino-C₁₋₈alkoxy, (C₁₋₈alkoxy-C₁₋₈alkyl)(C₁₋₈alkyl)amino-C₁₋₈alkoxy, amino-C₂₋₈alkenyl, C₁₋₈alkyl-amino-C₂₋₈alkenyl, (C₁₋₈alkyl)₂-amino-C₂₋₈alkenyl, amino-C₂₋₈alkynyl, C₁₋₈alkyl-amino-C₂₋₈alkynyl, (C₁₋₈alkyl)₂-amino-C₂₋₈alkynyl, halo-C₁₋₈alkyl-amino, (halo-C₁₋₈alkyl)₂-amino, (halo-C₁₋₈alkyl)(C₁₋₈alkyl)amino, hydroxy-C₁₋₈alkyl, hydroxy-C₁₋₈alkoxy-C₁₋₈alkyl, hydroxy-C₁₋₈alkyl-amino, (hydroxy-C₁₋₈alkyl)₂-amino, (hydroxy-C₁₋₈alkyl)(C₁₋₈alkyl)amino, hydroxy-C₁₋₈alkyl-amino-C₁₋₈alkyl, (hydroxy-C₁₋₈alkyl)₂-amino-C₁₋₈alkyl, (hydroxy-C₁₋₈alkyl)(C₁₋₈alkyl)amino-C₁₋₈alkyl, hydroxy-C₁₋₈alkyl-amino-C₁₋₈alkoxy, (hydroxy-C₁₋₈alkyl)₂-amino-C₁₋₈alkoxy, (hydroxy-C₁₋₈alkyl)(C₁₋₈alkyl)amino-C₁₋₈alkoxy, hydroxy-C₁₋₈alkyl-amino-C₁₋₈alkyl-amino, (hydroxy-C₁₋₈alkyl-amino-C₁₋₈alkyl)₂-amino, (hydroxy-C₁₋₈alkyl)₂-amino-C₁₋₈alkyl-amino, (hydroxy-C₁₋₈alkyl-amino-C₁₋₈alkyl)(C₁₋₈alkyl)amino, (hydroxy-C₁₋₈alkyl)(C₁₋₈alkyl)amino-C₁₋₈alkyl-amino, [(hydroxy-C₁₋₈alkyl)₂-amino-C₁₋₈alkyl](C₁₋₈alkyl)amino or [(hydroxy-C₁₋₈alkyl)(C₁₋₈alkyl)amino-C₁₋₈alkyl](C₁₋₈alkyl)amino.

[0528] In another embodiment of the use of a compound of Formula (I),

[0529] R₁ is heterocyclyl, heterocyclyl-C₁₋₈alkyl, heterocyclyl-C₁₋₈alkoxy, heterocyclyl-amino, (heterocyclyl)(C₁₋₈alkyl)amino, heterocyclyl-amino-C₁₋₈alkyl, heterocyclyl-C₁₋₈alkyl-amino, (heterocyclyl-C₁₋₈alkyl)₂-amino, (heterocyclyl-C₁₋₈alkyl)(C₁₋₈alkyl)amino, heterocyclyl-C₁₋₈alkyl-amino-C₁₋₈alkyl, (heterocyclyl-C₁₋₈alkyl)₂-amino-C₁₋₈alkyl, (heterocyclyl-C₁₋₈alkyl)(C₁₋₈alkyl)amino-C₁₋₈alkyl, heterocyclyl-oxy, heterocyclyl-carbonyl, heterocyclyl-carbonyl-oxy, C₃₋₁₄cycloalkyl, aryl-C₁₋₈alkyl-amino, (aryl-C₁₋₈alkyl)₂-amino, (aryl-C₁₋₈alkyl)(C₁₋₈alkyl)amino, aryl-C₁₋₈alkyl-amino-C₁₋₈alkyl, (aryl-C₁₋₈alkyl)₂-amino-C₁₋₈alkyl, (aryl-C₁₋₈alkyl)(C₁₋₈alkyl)amino-C₁₋₈alkyl, heteroaryl, heteroaryl-C₁₋₈alkyl, heteroaryl-C₁₋₈alkoxy, heteroaryl-amino, heteroaryl-C₁₋₈alkyl-amino, (heteroaryl-C₁₋₈alkyl)₂-amino, (heteroaryl-C₁₋₈alkyl)(C₁₋₈alkyl)amino, heteroaryl-C₁₋₈alkyl-amino-C₁₋₈alkyl, (heteroaryl-C₁₋₈alkyl)₂-amino-C₁₋₈alkyl or (heteroaryl-C₁₋₈alkyl)(C₁₋₈alkyl)amino-C₁₋₈alkyl; wherein, each instance of heterocyclyl, C₃₋₁₄cycloalkyl, aryl and heteroaryl is optionally substituted with R₃ and R₄ substituents.

[0530] In another embodiment of the use of a compound of Formula (I),

[0531] R₁ is heterocyclyl, heterocyclyl-C₁₋₈alkyl, heterocyclyl-C₁₋₈alkoxy, heterocyclyl-amino, (heterocyclyl)(C₁₋₈alkyl)amino, heterocyclyl-amino-C₁₋₈alkyl, heterocyclyl-C₁₋₈alkyl-amino, (heterocyclyl-C₁₋₈alkyl)₂-amino, (heterocyclyl-C₁₋₈alkyl)(C₁₋₈alkyl)amino, heterocyclyl-C₁₋₈alkyl-amino-C₁₋₈alkyl, (heterocyclyl-C₁₋₈alkyl)₂-amino-C₁₋₈alkyl, (heterocyclyl-C₁₋₈alkyl)(C₁₋₈alkyl)amino-C₁₋₈alkyl, heterocyclyl-oxy, heterocyclyl-carbonyl or heterocyclyl-carbonyl-oxy; wherein, each instance of heterocyclyl is optionally substituted with R₃ and R₄ substituents.

[0532] In another embodiment of the use of a compound of Formula (I), R₁ is heterocyclyl optionally substituted with R₃ and R₄ substituents.

[0533] In another embodiment of the use of a compound of Formula (I), R₁ is C₃₋₁₄cycloalkyl optionally substituted with R₃ and R₄ substituents.

[0534] In another embodiment of the use of a compound of Formula (I),

[0535] R₁ is aryl-C₁₋₈alkyl-amino, (aryl-C₁₋₈alkyl)₂-amino, (aryl-C₁₋₈alkyl)(C₁₋₈alkyl)amino, aryl-C₁₋₈alkyl-amino-C₁₋₈alkyl, (aryl-C₁₋₈alkyl)₂-amino-C₁₋₈alkyl or (aryl-C₁₋₈alkyl)(C₁₋₈alkyl)amino-C₁₋₈alkyl; wherein, each instance of aryl is optionally substituted with R₃ and R₄ substituents.

[0536] In another embodiment of the use of a compound of Formula (I), R₁ is aryl-C₁₋₈alkyl-amino optionally substituted with R₃ and R₄ substituents.

[0537] In another embodiment of the use of a compound of Formula (I),

[0538] R₁ is heteroaryl, heteroaryl-C₁₋₈alkyl, heteroaryl-C₁₋₈alkoxy, heteroaryl-amino, heteroaryl-C₁₋₈alkyl-amino, (heteroaryl-C₁₋₈alkyl)₂-amino, (heteroaryl-C₁₋₈alkyl)(C₁₋₈alkyl)amino, heteroaryl-C₁₋₈alkyl-amino-C₁₋₈alkyl, (heteroaryl-C₁₋₈alkyl)₂-amino-C₁₋₈alkyl or (heteroaryl-C₁₋₈alkyl)(C₁₋₈alkyl)amino-C₁₋₈alkyl; wherein, each instance of heterocyclyl, C₃₋₁₄cycloalkyl, aryl and heteroaryl is optionally substituted with R₃ and R₄ substituents.

[0539] In another embodiment of the use of a compound of Formula (I), R₁ is heteroaryl optionally substituted with R₃ and R₄ substituents.

[0540] In one embodiment of the use of a compound of Formula (I),

[0541] R₁ is heterocyclyl selected from azetidinyl, tetrahydrofuranyl, pyrrolidinyl, piperidinyl, piperazinyl, 1,4-diazepanyl, 1,2,5,6-tetrahydropyridinyl, 1,2,3,6-tetrahydropyridinyl, hexahydropyrrolo[3,4-b]pyrrol-(1H)-yl, (3aS,6aS)-hexahydropyrrolo[3,4-b]pyrrol-(1H)-yl, (3aR,6aR)-hexahydropyrrolo[3,4-h]pyrrol-(1H)-yl, hexahydropyrrolo[3,4-b]pyrrol-(2H)-yl, (3aS,6aS)-hexahydropyrrolo[3,4-b]pyrrol-(2H)-yl, hexahydropyrrolo[3,4-c]pyrrol-(1H)-yl, (3aR,6aS)-hexahydropyrrolo[3,4-c]pyrrol-(1H)-yl, octahydro-5H-pyrrolo[3,2-c]pyridinyl, octahydro-6H-pyrrolo[3,4-b]pyridinyl, (4aR,7aR)-octahydro-6H-pyrrolo[3,4-b]pyridinyl, (4aS,7aS)-octahydro-6H-pyrrolo[3,4-b]pyridinyl, hexahydropyrrolo[1,2-a]pyrazin-(2H)-one, hexahydropyrrolo[1,2-a]pyrazin-(1H)-yl, (7R,8aS)-hexahydropyrrolo[1,2-a]pyrazin-(1H)-yl, (8aS)-hexahydropyrrolo[1,2-a]pyrazin-(1H)-yl, (8aR)-hexahydropyrrolo[1,2-a]pyrazin-(1H)-yl, (8aS)-octahydropyrrolo[1,2-a]pyrazin-(1H)-yl, (8aR)-octahydropyrrolo[1,2-a]pyrazin-(1H)-yl, octahydro-2H-pyrido[1,2-a]pyrazinyl, 3-azabicyclo[3.1.0]hexyl, (1R,5S)-3-azabicyclo[3.1.0]hexyl, 8-azabicyclo[3.2.1]octyl, (1R,5S)-8-azabicyclo[3.2.1]octyl, 8-azabicyclo[3.2.1]oct-2-enyl, (1R,5S)-8-azabicyclo[3.2.1]oct-2-enyl, 9-azabicyclo[3.3.1]nonyl, (1R,5S)-9-azabicyclo[3.3.1]nonyl, 2,5-diazabicyclo[2.2.1]heptyl, (1S,4S)-2,5-diazabicyclo[2.2.1]heptyl, 2,5-diazabicyclo[2.2.2]octyl, 3,8-diazabicyclo[3.2.1]octyl, (1R,5S)-3,8-diazabicyclo[3.2.1]octyl, 1,4-diazabicyclo[3.2.2]nonyl, azaspiro[3.3]heptyl, 2,6-diazaspiro[3.3]heptyl, 2,7-diazaspiro[3.5]nonyl, 5,8-diazaspiro[3.5]nonyl, 2,7-diazaspiro[4.4]nonyl or 6,9-diazaspiro[4.5]decyl; wherein, each instance of heterocyclyl is optionally substituted with R₃ and R₄ substituents.

[0542] In another embodiment of the use of a compound of Formula (I),

[0543] R₁ is heterocyclyl selected from azetidin-1-yl, tetrahydrofuran-3-yl, pyrrolidin-1-yl, piperidin-1-yl, piperidin-4-yl, piperazin-1-yl, 1,4-diazepan-1-yl, 1,2,5,6-tetrahydropyridin-5-yl, 1,2,3,6-tetrahydropyridin-4-yl, hexahydropyrrolo[3,4-b]pyrrol-1(2H)-yl, (3aS,6aS)-hexahydropyrrolo[3,4-b]pyrrol-1(2H)-yl, (3aS,6aS)-hexahydropyrrolo[3,4-b]pyrrol-5(1H)-yl, (3aR,6aR)-hexahydropyrrolo[3,4-b]pyrrol-5(1H)-yl, hexahydropyrrolo[3,4-c]pyrrol-2(1H)-yl, (3aR,6aS)-hexahydropyrrolo[3,4-c]pyrrol-2(1H)-yl, octahydro-5H-pyrrolo[3,2-c]pyridin-5-yl, octahydro-6H-pyrrolo[3,4-b]pyridin-6-yl, (4aR,7aR)-octahydro-6H-pyrrolo[3,4-b]pyridin-6-yl, (4aS,7aS)-octahydro-6H-pyrrolo[3,4-b]pyridin-6-yl, hexahydropyrrolo[1,2-a]pyrazin-6(2H)-one, hexahydropyrrolo[1,2-a]pyrazin-2(1H)-yl, (7R,8aS)-hexahydropyrrolo[1,2-a]pyrazin-2(1H)-yl, (8aS)-hexahydropyrrolo[1,2-a]pyrazin-2(1H)-yl, (8aR)-hexahydropyrrolo[1,2-a]pyrazin-2(1H)-yl, (8aS)-octahydropyrrolo[1,2-a]pyrazin-2(1H)-yl, (8aR)-octahydropyrrolo[1,2-a]pyrazin-2(1H)-yl, octahydro-2H-pyrido[1,2-a]pyrazin-2-yl, 3-azabicyclo[3.1.0]hex-3-yl, 8-azabicyclo[3.2.1]oct-3-yl, (1R,5S)-8-azabicyclo[3.2.1]oct-3-yl, 8-azabicyclo[3.2.1]oct-2-en-3-yl, (1R,5S)-8-azabicyclo[3.2.1]oct-2-en-3-yl, 9-azabicyclo[3.3.1]non-3-yl, (1R,5S)-9-azabicyclo[3.3.1]non-3-yl, 2,5-diazabicyclo[2.2.1]hept-2-yl, (1S,4S)-2,5-diazabicyclo[2.2.1]hept-2-yl, 2,5-diazabicyclo[2.2.2]oct-2-yl, 3,8-diazabicyclo[3.2.1]oct-3-yl, (1R,5S)-3,8-diazabicyclo[3.2.1]oct-3-yl, 1,4-diazabicyclo[3.2.2]non-4-yl, azaspiro[3.3]hept-2-yl, 2,6-diazaspiro[3.3]hept-2-yl, 2,7-diazaspiro[3.5]non-7-yl, 5,8-diazaspiro[3.5]non-8-yl, 2,7-diazaspiro[4.4]non-2-yl or 6,9-diazaspiro[4.5]dec-9-yl; wherein, each instance of heterocyclyl is optionally substituted with R₃ and R₄ substituents.

[0544] In another embodiment of the use of a compound of Formula (I),

[0545] R₁ is substituted heterocyclyl selected from 4-methyl-1,4-diazepan-1-yl, (3aS,6aS)-1-methylhexahydropyrrolo[3,4-b]pyrrol-5(1H)-yl, (3aS,6aS)-5-methylhexahydropyrrolo[3,4-b]pyrrol-1(2H)-yl, (3aR,6aR)-1-methylhexahydropyrrolo[3,4-b]pyrrol-5(1H)-yl, (3aR,6aS)-5-methylhexahydropyrrolo[3,4-c]pyrrol-2(1H)-yl, (3aR,6aS)-5-(2-hydroxyethyl)hexahydropyrrolo[3,4-c]pyrrol-2(1H)-yl, (3aR,6aS)-5-(propan-2-yl)hexahydropyrrolo[3,4-c]pyrrol-2(1H)-yl, (3aR,6aS)-5-ethylhexahydropyrrolo[3,4-c]pyrrol-2(1H)-yl, (4aR,7aR)-1-methyloctahydro-6H-pyrrolo[3,4-b]pyridin-6-yl, (4aR,7aR)-1-ethyloctahydro-6H-pyrrolo[3,4-b]pyridin-6-yl, (4aR,7aR)-1-(2-hydroxyethyl)octahydro-6H-pyrrolo[3,4-b]pyridin-6-yl, (4aS,7aS)-1-methyloctahydro-6H-pyrrolo[3,4-b]pyridin-6-yl, (4aS,7aS)-1-(2-hydroxyethyl)octahydro-6H-pyrrolo[3,4-b]pyridin-6-yl, (7R,8aS)-7-hydroxyhexahydropyrrolo[1,2-a]pyrazin-2(1H)-yl, (8aS)-8a-methyloctahydropyrrolo[1,2-a]pyrazin-2(1H)-yl, (8aR)-8a-methyloctahydropyrrolo[1,2-a]pyrazin-2(1H)-yl, (1R,5S,6s)-6-(dimethylamino)-3-azabicyclo[3.1.0]hex-3-yl, (1R,5S)-8-methyl-8-azabicyclo[3.2.1]oct-3-yl, 9-methyl-9-azabicyclo[3.3.1]non-3-yl, (3-exo)-9-methyl-9-azabicyclo[3.3.1]non-3-yl, (1R,5S)-9-methyl-9-azabicyclo[3.3.1]non-3-yl, (1S,4S)-5-methyl-2,5-diazabicyclo[2.2.1]hept-2-yl or (1S,4S)-5-ethyl-2,5-diazabicyclo[2.2.1]hept-2-yl.

[0546] In one embodiment of the use of a compound of Formula (I), R₁ is heterocyclyl-C₁₋₈alkyl, wherein heterocyclyl is selected from morpholinyl, piperidinyl, piperazinyl, imidazolyl or pyrrolidinyl; and, wherein, each instance of heterocyclyl is optionally substituted with R₃ and R₄ substituents.

[0547] In another embodiment of the use of a compound of Formula (I), R₁ is heterocyclyl-C₁₋₈alkyl selected from morpholin-4-yl-methyl, morpholin-4-yl-ethyl, morpholin-4-yl-propyl, piperidin-1-yl-methyl, piperazin-1-yl-methyl, piperazin-1-yl-ethyl, piperazin-1-yl-propyl, piperazin-1-yl-butyl, imidazol-1-yl-methyl, imidazol-1-yl-ethyl, imidazol-1-yl-propyl, imidazol-1-yl-butyl, pyrrolidin-1-yl-methyl, pyrrolidin-1-yl-ethyl, pyrrolidin-1-yl-propyl or pyrrolidin-1-yl-butyl; wherein, each instance of heterocyclyl is optionally substituted with R₃ and R₄ substituents.

[0548] In one embodiment of the use of a compound of Formula (I), R₁ is heterocyclyl-C₁₋₈alkoxy, wherein heterocyclyl is selected from pyrrolidinyl, piperidinyl or morpholinyl; and, wherein, each instance of heterocyclyl is optionally substituted with R₃ and R₄ substituents.

[0549] In another embodiment of the use of a compound of Formula (I), R₁ is heterocyclyl-C₁₋₈alkoxy selected from pyrrolidin-2-yl-methoxy, pyrrolidin-2-yl-ethoxy, pyrrolidin-1-yl-methoxy, pyrrolidin-1-yl-ethoxy, piperidin-1-yl-methoxy, piperidin-1-yl-ethoxy, morpholin-4-yl-methoxy or morpholin-4-yl-ethoxy; wherein, each instance of heterocyclyl is optionally substituted with R₃ and R₄ substituents.

[0550] In one embodiment of the use of a compound of Formula (I), R₁ is heterocyclyl-amino, wherein heterocyclyl is selected from azetidinyl, pyrrolidinyl, piperidinyl, 9-azabicyclo[3.3.1]nonyl or (1R,5S)-9-azabicyclo[3.3.1]nonyl; and, wherein, each instance of heterocyclyl is optionally substituted with R₃ and R₄ substituents.

[0551] In another embodiment of the use of a compound of Formula (I), R₁ is heterocyclyl-amino selected from azetidin-3-yl-amino, pyrrolidin-3-yl-amino, piperidin-4-yl-amino, 9-azabicyclo[3.3.1]non-3-yl-amino, (1R,5S)-9-azabicyclo[3.3.1]non-3-yl-amino, 9-methyl-9-azabicyclo[3.3.1]non-3-yl-amino, (3-exo)-9-methyl-9-azabicyclo[3.3.1]non-3-yl-amino or (1R,5S)-9-methyl-9-azabicyclo[3.3.1]non-3-yl-amino; wherein, each instance of heterocyclyl is optionally substituted with R₃ and R₄ substituents.

[0552] In one embodiment of the use of a compound of Formula (I), R₁ is (heterocyclyl)(C₁₋₈alkyl)amino, wherein heterocyclyl is selected from pyrrolidinyl or piperidinyl; and, wherein, each instance of heterocyclyl is optionally substituted with R₃ and R₄ substituents.

[0553] In another embodiment of the use of a compound of Formula (I), R₁ is (heterocyclyl)(C₁₋₈alkyl)amino selected from (pyrrolidin-3-yl)(methyl)amino or (piperidin-4-yl)methyl)amino; wherein, each instance of heterocyclyl is optionally substituted with R₃ and R₄ substituents.

[0554] In one embodiment of the use of a compound of Formula (I), R₁ is heterocyclyl-amino-C₁₋₈alkyl, wherein heterocyclyl is selected from tetrahydrofuranyl; and, wherein, each instance of heterocyclyl is optionally substituted with R₃ and R₄ substituents.

[0555] In another embodiment of the use of a compound of Formula (I), R₁ is heterocyclyl-amino-C₁₋₈alkyl, selected from 3-(tetrahydrofuran-3-yl-amino)propyl; wherein, each instance of heterocyclyl is optionally substituted with R₃ and R₄ substituents.

[0556] In one embodiment of the use of a compound of Formula (I), R₁ is heterocyclyl-C₁₋₈alkyl-amino-C₁₋₈alkyl, wherein heterocyclyl is selected from tetrahydrofuranyl, thienyl or pyridinyl; and, wherein, each instance of heterocyclyl is optionally substituted with R₃ and R₄ substituents.

[0557] In another embodiment of the use of a compound of Formula (I), R₁ is heterocyclyl-C₁₋₈alkyl-amino-C₁₋₈alkyl, selected from 3-[(tetrahydrofuran-2-ylmethyl)amino]propyl, 3-[(thienyl-3-ylmethyl)amino]propyl, 3-[(pyridin-2-ylmethyl)amino]propyl or 3-[(pyridin-4-ylmethyl)amino]propyl; wherein, each instance of heterocyclyl is optionally substituted with R₃ and R₄ substituents.

[0558] In one embodiment of the use of a compound of Formula (I), R₁ is heterocyclyl-oxy, wherein heterocyclyl is selected from pyrrolidinyl or piperidinyl; and, wherein, each instance of heterocyclyl is optionally substituted with R₃ and R₄ substituents.

[0559] In another embodiment of the use of a compound of Formula (I), R₁ is heterocyclyl-oxy selected from pyrrolidin-3-yl-oxy or piperidin-4-yl-oxy; wherein, each instance of heterocyclyl is optionally substituted with R₃ and R₄ substituents.

[0560] In one embodiment of the use of a compound of Formula (I), R₁ is heterocyclyl-carbonyl, wherein heterocyclyl is selected from piperazinyl; and, wherein, each instance of heterocyclyl is optionally substituted with R₃ and R₄ substituents.

[0561] In another embodiment of the use of a compound of Formula (I), R₁ is heterocyclyl-carbonyl selected from piperazin-1-yl-carbonyl; wherein, each instance of heterocyclyl is optionally substituted with R₃ and R₄ substituents.

[0562] In one embodiment of the use of a compound of Formula (I), R₁ is heterocyclyl-carbonyl-oxy, wherein heterocyclyl is selected from piperazinyl; and, wherein, each instance of heterocyclyl is optionally substituted with R₃ and R₄ substituents.

[0563] In another embodiment of the use of a compound of Formula (I), R₁ is heterocyclyl-carbonyl-oxy selected from piperazin-1-yl-carbonyl-oxy; wherein, each instance of heterocyclyl is optionally substituted with R₃ and R₄ substituents.

[0564] In one embodiment of the use of a compound of Formula (I), R₁ is C₃₋₁₄cycloalkyl selected from cyclopropyl, cyclobutyl, cyclopentyl, cyclohexyl, cyclohexenyl or cycloheptyl; wherein, each instance of C₃₋₁₄cycloalkyl is optionally substituted with R₃ and R₄ substituents.

[0565] In another embodiment of the use of a compound of Formula (I), R₁ is C₃₋₈cycloalkyl selected from cyclopropyl, cyclobutyl, cyclopentyl, cyclohexyl, cyclohexenyl or cycloheptyl; wherein, each instance of C₃₋₈cycloalkyl is optionally substituted with R₃ and R₄ substituents.

[0566] In one embodiment of the use of a compound of Formula (I), R₁ is aryl-C₁₋₈alkyl-amino-C₁₋₈alkyl, wherein aryl is selected from phenyl; and, wherein, each instance of aryl is optionally substituted with R₃ and R₄ substituents.

[0567] In another embodiment of the use of a compound of Formula (I), R₁ is aryl-C₁₋₈alkyl-amino-C₁₋₈alkyl selected from 3-(benzylamino)propyl; wherein, each instance of aryl is optionally substituted with R₃ and R₄ substituents.

[0568] In one embodiment of the use of a compound of Formula (I), R₁ is heteroaryl, wherein heteroaryl is selected from pyridinyl; and, wherein, each instance of heteroaryl is optionally substituted with R₃ and R₄ substituents.

[0569] In another embodiment of the use of a compound of Formula (I), R₁ is heteroaryl selected from pyridin-4-yl; wherein, each instance of heteroaryl is optionally substituted with R₃ and R₄ substituents.

[0570] In one embodiment of the use of a compound of Formula (I), R₁ is heteroaryl-C₁₋₈alkyl, wherein heteroaryl is selected from 1H-imidazolyl; and, wherein, each instance of heteroaryl is optionally substituted with R₃ and R₄ substituents.

[0571] In another embodiment of the use of a compound of Formula (I), R₁ is heteroaryl-C₁₋₈alkyl selected from 1H-imidazol-1-yl-methyl; wherein, each instance of heteroaryl is optionally substituted with R₃ and R₄ substituents.

[0572] In one embodiment of the use of a compound of Formula (I), R₁ is (heteroaryl-C₁₋₈alkyl)(C₁₋₈alkyl)amino, wherein heteroaryl is selected from pyridinyl; and, wherein, each instance of heteroaryl is optionally substituted with R₃ and R₄ substituents.

[0573] In another embodiment of the use of a compound of Formula (I), R₁ is (heteroaryl-C₁₋₈alkyl)(C₁₋₈alkyl)amino selected from (pyridin-3-ylmethylxmethyl)amino; wherein, each instance of heteroaryl is optionally substituted with R₃ and R₄ substituents.

[0574] In one embodiment of the use of a compound of Formula (I), R₁ is heteroaryl-C₁₋₈alkyl-amino-C₁₋₈alkyl, wherein heteroaryl is selected from thienyl or pyridinyl; and, wherein, each instance of heteroaryl is optionally substituted with R₃ and R₄ substituents.

[0575] In another embodiment of the use of a compound of Formula (I), R₁ is heteroaryl-C₁₋₈alkyl-amino-C₁₋₈alkyl selected from thien-3-yl-methyl-amino-propyl, pyridin-2-yl-methyl-amino-propyl, pyridin-3-yl-methyl-amino-propyl or pyridin-4-yl-methyl-amino-propyl; wherein, each instance of heteroaryl is optionally substituted with R₃ and R₄ substituents.

[0576] In one embodiment of the use of a compound of Formula (I), R₃ is selected from cyano, halogen, hydroxy, oxo, C₁₋₈alkyl, halo-C₁₋₈alkyl, C₁₋₈alkyl-carbonyl, C₁₋₈alkoxy, halo-C₁₋₈alkoxy, C₁₋₈alkoxy-C₁₋₈alkyl, C₁₋₈alkoxy-carbonyl, amino, C₁₋₈alkyl-amino, (C₁₋₈alkyl)₂-amino, amino-C₁₋₈alkyl, C₁₋₈alkyl-amino-C₁₋₈alkyl, (C₁₋₈alkyl)₂-amino-C₁₋₈alkyl, amino-C₁₋₈alkyl-amino, C₁₋₈alkyl-amino-C₁₋₈alkyl-amino, (C₁₋₈alkyl)₂-amino-C₁₋₈alkyl-amino, C₁₋₈alkoxy-C₁₋₈alkyl-amino, C₁₋₈alkyl-carbonyl-amino, C₁₋₈alkoxy-carbonyl-amino, hydroxy-C₁₋₈alkyl, hydroxy-C₁₋₈alkoxy-C₁₋₈alkyl, hydroxy-C₁₋₈alkyl-amino, (hydroxy-C₁₋₈alkyl)₂-amino or (hydroxy-C₁₋₈alkyl)(C₁₋₈alkyl)amino.

[0577] In another embodiment of the use of a compound of Formula (I), R₃ is selected from cyano, halogen, hydroxy, oxo, C₁₋₈alkyl, halo-C₁₋₈alkyl, C₁₋₈alkoxy, C₁₋₈alkoxy-C₁₋₈alkyl, C₁₋₈alkoxy-carbonyl, amino, C₁₋₈alkyl-amino, (C₁₋₈alkyl)₂-amino, amino-C₁₋₈alkyl, C₁₋₈alkyl-amino-C₁₋₈alkyl, (C₁₋₈alkyl)₂-amino-C₁₋₈alkyl, C₁₋₈alkyl-amino-C₁₋₈alkyl-amino, C₁₋₈alkoxy-C₁₋₈alkyl-amino, C₁₋₈alkoxy-carbonyl-amino, hydroxy-C₁₋₈alkyl, hydroxy-C₁₋₈alkoxy-C₁₋₈alkyl, hydroxy-C₁₋₈alkyl-amino, (hydroxy-C₁₋₈alkyl)₂-amino or (hydroxy-C₁₋₈alkyl)(C₁₋₈alkyl)amino.

[0578] In one embodiment of the use of a compound of Formula (I), R₃ is C₁₋₈alkyl selected from methyl, ethyl, propyl, isopropyl or tert-butyl.

[0579] In another embodiment of the use of a compound of Formula (I), R₃ is C₁₋₈alkyl selected from ethyl, propyl, isopropyl or tert-butyl.

[0580] In one embodiment of the use of a compound of Formula (I), R₃ is halo-C₁₋₈alkyl selected from trihalo-methyl, dihalo-methyl, halo-methyl, trihalo-ethyl, dihalo-ethyl, halo-ethyl, trihalo-propyl, dihalo-propyl or halo-propyl; wherein, halo is selected from fluoro, chloro, bromo or iodo.

[0581] In another embodiment of the use of a compound of Formula (I), R₃ is halo-C₁₋₈alkyl selected from trihalo-methyl, dihalo-methyl, halo-methyl, trihalo-ethyl, dihalo-ethyl, trihalo-propyl or dihalo-propyl; wherein, halo is selected from fluoro, chloro, bromo or iodo.

[0582] In one embodiment of the use of a compound of Formula (I), R₃ is hydroxy-C₁₋₈alkyl selected from hydroxy-methyl, hydroxy-ethyl, hydroxy-propyl, dihydroxy-propyl, hydroxy-butyl or dihydroxy-butyl.

[0583] In another embodiment of the use of a compound of Formula (I), R₃ is hydroxy-C₁₋₈alkyl selected from hydroxy-methyl, dihydroxy-propyl, hydroxy-butyl or dihydroxy-butyl.

[0584] In one embodiment of the use of compound of Formula (I), R₃ is C₁₋₈alkoxy selected from methoxy, ethoxy, propoxy or isopropoxy.

[0585] In one embodiment of the use of a compound of Formula (I), R₃ is halo-C₁₋₈alkoxy selected from trihalo-methoxy, dihalo-methoxy, halo-methoxy, trihalo-ethoxy, dihalo-ethoxy, halo-ethoxy, trihalo-propoxy, dihalo-propoxy or halo-propoxy; wherein, halo is selected from fluoro, chloro, bromo or iodo.

[0586] In one embodiment of the use of a compound of Formula (I), R₃ is C₁₋₈alkoxy-carbonyl-amino selected from methoxy-carbonyl-amino, ethoxy-carbonyl-amino, propoxy-carbonyl-amino, isopropoxy-carbonyl-amino, tert-butoxy-carbonyl-amino.

[0587] In one embodiment of the use of a compound of Formula (I), Rₐ is, in each instance, independently selected from hydrogen, halogen, C₁₋₈alkyl.

[0588] In one embodiment of the use of a compound of Formula (I), Rₐ is, in each instance, optionally and independently deuterium.

[0589] In one embodiment of the use of a compound of Formula (I), R_{b} is hydrogen, halogen, C₁₋₈alkyl, C₁₋₈alkoxy.

[0590] In one embodiment of the use of a compound of Formula (I), R_{c} is, in each instance, independently selected from hydrogen, halogen, C₁₋₈alkyl.

[0591] In one embodiment of the use of a compound of Formula (I), R_{c} is, in each instance, optionally and independently deuterium.

[0592] In one embodiment of the use of a compound of Formula (I), R_{b} is deuterium.

[0593] In one embodiment of the use of a compound of Formula (I), R₄ is C₃₋₁₄cycloalkyl selected from cyclopropyl, cyclobutyl, cyclopentyl, cyclohexyl or cycloheptyl; wherein, each instance of C₃₋₁₄cycloalkyl is optionally substituted with R₅ substituents.

[0594] In another embodiment of the use of a compound of Formula (I), R₄ is C-s-cycloalkyl selected from cyclopropyl, cyclobutyl, cyclopentyl, cyclohexyl or cycloheptyl; wherein, each instance of C₃₋₈cycloalkyl is optionally substituted with R₅ substituents.

[0595] In one embodiment of the use of a compound of Formula (I), R₄ is C₃₋₁₄cycloalkyl-C₁₋₈alkyl, wherein C₃₋₁₄cycloalkyl is selected from cyclopropyl, cyclobutyl, cyclopentyl, cyclohexyl or cycloheptyl; and, wherein, each instance of C₃₋₁₄cycloalkyl is optionally substituted with R₅ substituents.

[0596] In another embodiment of the use of a compound of Formula (I), R₄ is C₃₋₈cycloalkyl-C₁₋₈alkyl, wherein C₃₋₈cycloalkyl is selected from cyclopropyl, cyclobutyl, cyclopentyl, cyclohexyl or cycloheptyl; and, wherein, each instance of C₃₋₈cycloalkyl is optionally substituted with R₅ substituents.

[0597] In one embodiment of the use of a compound of Formula (I), R₄ is C₃₋₁₄cycloalkyl-amino, wherein C₃₋₁₄cycloalkyl is selected from cyclopropyl, cyclobutyl, cyclopentyl, cyclohexyl or cycloheptyl; and, wherein, each instance of C₃₋₁₄cycloalkyl is optionally substituted with R₅ substituents.

[0598] In another embodiment of the use of a compound of Formula (I), R₄ is C₃₋₈cycloalkyl-amino, wherein C₃₋₈cycloalkyl is selected from cyclopropyl, cyclobutyl, cyclopentyl, cyclohexyl or cycloheptyl; and, wherein, each instance of C₃₋₈cycloalkyl is optionally substituted with R₅ substituents.

[0599] In one embodiment of the use of a compound of Formula (I), R₄ is aryl-C₁₋₈alkyl, aryl-C₁₋₈alkoxy-carbonyl or aryl-sulfonyloxy-C₁₋₈alkyl, wherein aryl is selected from phenyl; and, wherein, each instance of aryl is optionally substituted with R₅ substituents.

[0600] In another embodiment of the use of a compound of Formula (I), R₄ is aryl-C₁₋₈alkyl or aryl-C₁₋₈alkoxy-carbonyl, wherein each instance of aryl is optionally substituted with R₅ substituents.

[0601] In one embodiment of the use of a compound of Formula (I), R₄ is heterocyclyl selected from oxetanyl, pyrrolidinyl, piperidinyl, piperazinyl, 1,3-dioxanyl or morpholinyl, wherein each instance of heterocyclyl is optionally substituted with R₅ substituents.

[0602] In another embodiment of the use of a compound of Formula (I), R₄ is heterocyclyl selected from oxetan-3-yl, pyrrolidin-1-yl, piperidin-1-yl, piperazin-1-yl, 1,3-dioxan-5-yl or morpholin-4-yl, wherein each instance of heterocyclyl is optionally substituted with R₅ substituents.

[0603] In one embodiment of the use of a compound of Formula (I), R₄ is heterocyclyl-C₁₋₈alkyl, wherein each instance of heterocyclyl is selected from pyrrolidinyl or piperidinyl; and, wherein, each instance of heterocyclyl is optionally substituted with R₅ substituents.

[0604] In another embodiment of the use of a compound of Formula (I), R₄ is heterocyclyl-C₁₋₈alkyl selected from pyrrolidin-1-yl-C₁₋₈alkyl or piperidin-1-yl-C₁₋₈alkyl, wherein each instance of heterocyclyl is optionally substituted with R₅ substituents.

[0605] In one embodiment of the use of a compound of Formula (I), R₅ is selected from halogen, hydroxy, cyano, nitro, halo-C₁₋₈alkyl, C₁₋₈alkoxy, halo-C₁₋₈alkoxy, amino, C₁₋₈alkyl-amino, (C₁₋₈alkyl)₂-amino or C₁₋₈alkyl-thio; wherein, halogen and halo is selected from fluoro, chloro, bromo or iodo.

[0606] In one embodiment of the use of a compound of Formula (I), R₅ is hydroxy.

[0607] In one embodiment of the use of a compound of Formula (I), R₅ is C₁₋₈alkyl selected from methyl, ethyl, propyl, isopropyl, n-butyl or tert-butyl.

[0608] In another embodiment of the use of a compound of Formula (I), R₅ is C₁₋₈alkyl selected from ethyl, propyl, isopropyl or tert-butyl.

[0609] In one embodiment of the use of a compound of Formula (I), R₁ is halo-C₁₋₈alkyl selected from trihalo-methyl, dihalo-methyl, halo-methyl, trihalo-ethyl, dihalo-ethyl, halo-ethyl, trihalo-propyl, dihalo-propyl or halo-propyl; wherein, halo is selected from fluoro, chloro, bromo or iodo.

[0610] In one embodiment of the use of a compound of Formula (I), R₅ is C₁₋₈alkoxy selected from methoxy, ethoxy, propoxy or isopropoxy.

[0611] In one embodiment of the use of a compound of Formula (I), R₅ is halo-C₁₋₈alkoxy selected from trihalo-methoxy, dihalo-methoxy, halo-methoxy, trihalo-ethoxy, dihalo-ethoxy, halo-ethoxy, trihalo-propoxy, dihalo-propoxy or halo-propoxy; wherein, halo is selected from fluoro, chloro, bromo or iodo.

[0612] In one embodiment of the use of a compound of Formula (I), R₂ is aryl selected from phenyl optionally substituted with R₆ and R₇ substituents.

[0613] In one embodiment of the use of a compound of Formula (I), R₂ is aryl-amino, wherein aryl is selected from phenyl; and, wherein, each instance of aryl is optionally substituted with R₆ and R₇ substituents.

[0614] In another embodiment of the use of a compound of Formula (I), R₂ is aryl-amino selected from phenyl-amino; wherein, each instance of aryl is optionally substituted with R₆ and R₇ substituents.

[0615] In one embodiment of the use of a compound of Formula (I), R₂ is aryl-amino-carbonyl, wherein aryl is selected from phenyl; and, wherein, each instance of aryl is optionally substituted with R₆ and R₇ substituents.

[0616] In another embodiment of the use of a compound of Formula (I), R₂ is aryl-amino-carbonyl selected from phenyl-amino-carbonyl; wherein, each instance of aryl is optionally substituted with R₆ and R₇ substituents.

[0617] In one embodiment of the use of a compound of Formula (I),

[0618] R₂ is heterocyclyl selected from 1,2,3,6-tetrahydropyridinyl, 1,3-benzodioxolyl or 2,3-dihydro-1,4-benzodioxinyl; wherein, each instance of heterocyclyl is optionally substituted with R₆ and R₇ substituents.

[0619] In another embodiment of the use of a compound of Formula (I),

[0620] R₂ is heterocyclyl selected from 1,2,3,6-tetrahydropyridin-4-yl, 1,3-benzodioxol-5-yl or 2,3-dihydro-1,4-benzodioxin-6-yl; wherein, each instance of heterocyclyl is optionally substituted with R₆ and R₇ substituents.

[0621] In one embodiment of the use of a compound of Formula (I),

[0622] R₂ is heteroaryl selected from thienyl, 1H-pyrazolyl, 1H-imidazolyl, 1,3-thiazolyl, 1,2,4-oxadiazolyl, 1,3,4-oxadiazolyl, pyridinyl, pyrimidinyl, 1H-indolyl, 2H-indolyl, 1H-indazolyl, 2H-indazolyl, indolizinyl, benzofuranyl, benzothienyl, 1H-benzimidazolyl, 1,3-benzothiazolyl, 1,3-benzoxazolyl, 9H-purinyl, furo[3,2-b]pyridinyl, furo[3,2-c]pyridinyl, furo[2,3-c]pyridinyl, thieno[3,2-c]pyridinyl, thieno[2,3-d]pyrimidinyl, 1H-pyrrolo[2,3-b]pyridinyl, 1H-pyrrolo[2,3-c]pyridinyl, pyrrolo[1,2-a]pyrimidinyl, pyrrolo[1,2-a]pyrazinyl, pyrrolo[1,2-b]pyridazinyl, pyrazolo[1,5-a]pyridinyl, pyrazolo[1,5-a]pyrazinyl, imidazo[1,2-a]pyridinyl, imidazo[1,2-a]pyrimidinyl, imidazo[1,2-c]pyrimidinyl, imidazo[1,2-b]pyridazinyl, imidazo[1,2-a]pyrazinyl, imidazo[2,1-b][1,3]thiazolyl, imidazo[2,1-b][1,3,4]thiadiazolyl, [1,3]oxazolo[4,5-b]pyridinyl or quinoxalinyl; wherein, each instance of heteroaryl is optionally substituted with R₆ and R₇ substituents.

[0623] In another embodiment of the use of a compound of Formula (I),

[0624] R₂ is heteroaryl selected from thien-2-yl, thien-3-yl, 1H-pyrazol-3-yl, 1H-pyrazol-4-yl, 1H-pyrazol-5-yl, 1H-imidazol-1-yl, 1H-imidazol-4-yl, 1,3-thiazol-2-yl, 1,2,4-oxadiazol-3-yl, 1,3,4-oxadiazol-2-yl, pyridin-2-yl, pyridin-3-yl, pyridin-4-yl, pyrimidin-4-yl, 1H-indol-3-yl, 1H-indol-4-yl, 1H-indol-5-yl, 1H-indol-6-yl, 1H-indazol-5-yl, 2H-indazol-5-yl, indolizin-2-yl, benzofuran-2-yl, benzofuran-5-yl, benzothien-2-yl, benzothien-3-yl, 1H-benzimidazol-2-yl, 1H-benzimidazol-6-yl, 1,3-benzoxazol-2-yl, 1,3-benzoxazol-5-yl, 1,3-benzoxazol-6-yl, 1,3-benzothiazol-2-yl, 1,3-benzothiazol-5-yl, 1,3-benzothiazol-6-yl, 9H-purin-8-yl, furo[3,2-b]pyridin-2-yl, furo[3,2-c]pyridin-2-yl, furo[2,3-c]pyridin-2-yl, thieno[3,2-c]pyridin-2-yl, thieno[2,3-d]pyrimidin-6-yl, 1H-pyrrolo[2,3-b]pyridin-5-yl, 1H-pyrrolo[2,3-c]pyridin-4-yl, pyrrolo[1,2-a]pyrimidin-7-yl, pyrrolo[1,2-a]pyrazin-7-yl, pyrrolo[1,2-b]pyridazin-2-yl, pyrazolo[1,5-a]pyridin-2-yl, pyrazolo[1,5-a]pyrazin-2-yl, imidazo[1,2-a]pyridin-2-yl, imidazo[1,2-a]pyridin-6-yl, imidazo[1,2-a]pyrimidin-2-yl, imidazo[1,2-a]pyrimidin-6-yl, imidazo[1,2-c]pyrimidin-2-yl, imidazo[1,2-b]pyridazin-2-yl, imidazo[1,2-a]pyrazin-2-yl, imidazo[2,1-b][1,3]thiazol-6-yl, imidazo[2,1-b][1,3,4]thiadiazol-6-yl, [1,3]oxazolo[4,5-b]pyridin-2-yl or quinoxalin-2-yl; wherein, each instance of heteroaryl is optionally substituted with R₆ and R₇ substituents.

[0625] In another embodiment of the use of a compound of Formula (I),

[0626] R₂ is substituted heteroaryl selected from 4-methylthien-2-yl, 1-methyl-1H-pyrazol-3-yl, 4-methyl-1H-pyrazol-3-yl, 1-phenyl-1H-pyrazol-3-yl, 1-phenyl-1H-imidazol-4-yl, 2-methyl-1-(pyridin-2-yl)-1H-imidazol-4-yl, 4-methyl-1,3-thiazol-2-yl, 4-(trifluoromethyl)-1,3-thiazol-2-yl, 4-phenyl-1,3-thiazol-2-yl, 5-phenyl-1,2,4-oxadiazol-3-yl, 3-fluoropyridin-4-yl, 6-fluoropyridin-2-yl, 2-chloropyridin-4-yl, 4-chloropyridin-3-yl, 5-chloropyridin-2-yl, 6-methylpyridin-3-yl, 2-(trifluoromethyl)pyridin-3-yl, 4-(trifluoromethyl)pyridin-2-yl, 6-(trifluoromethyl)pyridin-2-yl, 2-methoxypyridin-4-yl, 4-methoxypyridin-3-yl, 6-methoxypyridin-2-yl, 2-ethoxypyridin-3-yl, 6-ethoxypyridin-2-yl, 6-(propan-2-yloxy)pyridin-2-yl, 6-(dimethylamino)pyridin-3-yl, 6-(methylsulfanyl)pyridin-2-yl, 6-(cyclobutyloxy)pyridin-2-yl, 6-(pyrrolidin-1-yl)pyridin-2-yl, 2-methylpyrimidin-4-yl, 2-(propan-2-yl)pyrimidin-4-yl, 2-cyclopropylpyrimidin-4-yl, 1-methyl-1H-indol-3-yl, 2-methyl-2H-indazol-5-yl, 2-methyl-1-benzofuran-5-yl, 1-methyl-1H-benzimidazol-2-yl, 4-methyl-1H-benzimidazol-2-yl 5-fluoro-1FH-benzimidazol-2-yl, 4-fluoro-1,3-benzoxazol-2-yl, 5-fluoro-1,3-benzoxazol-2-yl, 4-chloro-1,3-benzoxazol-2-yl, 4-iodo-1,3-benzoxazol-2-yl, 2-methyl-1,3-benzoxazol-6-yl, 4-methyl-1,3-benzoxazol-2-yl, 4-(trifluoromethyl)-1,3-benzoxazol-2-yl, 7-(trifluoromethyl)-1,3-benzoxazol-2-yl, 2-methyl-1,3-benzothiazol-2-yl, 2-methyl-1,3-benzothiazol-5-yl, 2-methyl-1,3-benzothiazol-6-yl, 4-chloro-1,3-benzothiazol-2-yl, 7-chloro-1,3-benzothiazol-2-yl, 4-(trifluoromethyl)-1,3-benzothiazol-2-yl, 5-methylfuro[3,2-b]pyridin-2-yl, 4,6-dimethylfuro[3,2-c]pyridin-2-yl, 5,7-dimethylfuro[2,3-c]pyridin-2-yl, 4,6-dimethylthieno[3,2-c]pyridin-2-yl, 2,4-dimethylthieno[2,3-d]pyrimidin-6-yl, 1-methylpyrrolo[1,2-a]pyrazin-7-yl, 3-methylpyrrolo[1,2-a]pyrazin-7-yl, 1,3-dimethylpyrrolo[1,2-a]pyrazin-7-yl, 2-methylpyrrolo[1,2-b]pyridazin-2-yl, 4,6-dimethylpyrazolo[1,5-a]pyrazin-2-yl, 5-methylpyrazolo[1,5-a]pyridin-2-yl, 4,6-dimethylpyrazolo[1,5-a]pyrazin-2-yl, 2-chloroimidazo[2,1-b][1,3]thiazol-6-yl, 2-methylimidazo[2,1-b][1,3]thiazol-6-yl, 3-methylimidazo[2,1-b][1,3]thiazol-6-yl, 2-ethylimidazo[2,1-b][1,3]thiazol-6-yl, 2-methylimidazo[2,1-b][1,3,4]thiadiazol-6-yl, 6-cyanoimidazo[1,2-a]pyridin-2-yl (also referred to as 2-imidazo[1,2-a]pyridine-6-carbonitrile), 6-fluoroimidazo[1,2-a]pyridin-2-yl, 8-fluoroimidazo[1,2-a]pyridin-2-yl, 6,8-difluoroimidazo[1,2-a]pyridin-2-yl, 7-(trifluoromethyl)imidazo[1,2-a]pyridin-2-yl, 8-(trifluoromethyl)imidazo[1,2-a]pyridin-2-yl, 6-chloroimidazo[1,2-a]pyridin-2-yl, 7-chloroimidazo[1,2-a]pyridin-2-yl, 8-chloroimidazo[1,2-a]pyridin-2-yl, 8-bromoimidazo[1,2-a]pyridin-2-yl, 2-methylimidazo[1,2-a]pyridin-2-yl, 5-methylimidazo[1,2-a]pyridin-2-yl, 6-methylimidazo[1,2-a]pyridin-2-yl, 7-methylimidazo[1,2-a]pyridin-2-yl, 8-methylimidazo[1,2-a]pyridin-2-yl, 7-ethylimidazo[1,2-a]pyridin-2-yl, 8-ethylimidazo[1,2-a]pyridin-2-yl, 6,8-dimethylimidazo[1,2-a]pyridin-2-yl, 8-ethyl-6-methylimidazo[1,2-a]pyridin-2-yl, 7-methoxyimidazo[1,2-a]pyridin-2-yl, 8-methoxyimidazo[1,2-a]pyridin-2-yl, 6-fluoro-8-methylimidazo[1,2-a]pyridin-2-yl, 8-fluoro-6-methylimidazo[1,2-a]pyridin-2-yl, 8-chloro-6-methylimidazo[1,2-a]pyridin-2-yl, 6-methyl-8-nitroimidazo[1,2-a]pyridin-2-yl, 8-cyclopropylimidazo[1,2-a]pyridin-2-yl, 2-methylimidazo[1,2-a]pyridin-6-yl, 2-ethylimidazo[1,2-a]pyridin-6-yl, 2,3-dimethylimidazo[1,2-a]pyridin-6-yl, 2,8-dimethylimidazo[1,2-a]pyridin-6-yl, 2-(trifluoromethyl)imidazo[1,2-a]pyridin-6-yl, 8-chloro-2-methylimidazo[1,2-a]pyridin-6-yl, 8-fluoro-2-methylimidazo[1,2-a]pyridin-6-yl, 6-fluoroimidazo[1,2-a]pyrimidin-2-yl, 6-chloroimidazo[1,2-a]pyrimidin-2-yl, 6-methylimidazo[1,2-a]pyrimidin-2-yl, 7-methylimidazo[1,2-a]pyrimidin-2-yl, 2-methylimidazo[1,2-a]pyrimidin-6-yl, 6-methylimidazo[1,2-b]pyridazin-2-yl, 2-methyl-3-(1,2,3,6-tetrahydropyridin-4-yl)imidazo[1,2-b]pyridazin-6-yl, 6-methylimidazo[1,2-a]pyrazin-2-yl, 8-methylimidazo[1,2-a]pyrazin-2-yl, 6,8-dimethylimidazo[1,2-a]pyrazin-2-yl, 6-chloro-8-methylimidazo[1,2-a]pyrazin-2-yl, 6-methyl-8-(trifluoromethyl)imidazo[1,2-a]pyrazin-2-yl, 8-(methylsulfanyl)imidazo[1,2-a]pyrazin-2-yl, 2-methylimidazo[2,1-b][1,3]thiazol-6-yl, 3-methylimidazo[2,1-b][1,3]thiazol-6-yl or 2-methylimidazo[2,1-b][1,3,4]thiadiazol-6-yl.

[0627] In another embodiment of the use of a compound of Formula (I),

[0628] R₂ is heteroaryl selected from thienyl, 1H-pyrazolyl, 1H-imidazolyl, 1,3-thiazolyl, 1,2,4-oxadiazolyl, 1,3,4-oxadiazolyl, pyridinyl, pyrimidinyl, 1H-indolyl, 2H-indolyl, 1H-indazolyl, 2H-indazolyl, indolizinyl, benzofuranyl, benzothienyl, 1H-benzimidazolyl, 1,3-benzothiazolyl, 1,3-benzoxazolyl, 9H-purinyl; wherein, each instance of heteroaryl is optionally substituted with R₆ and R₇ substituents.

[0629] In another embodiment of the use of a compound of Formula (I),

[0630] R₂ is heteroaryl selected from furo[3,2-b]pyridinyl, furo[3,2-c]pyridinyl, furo[2,3-c]pyridinyl, thieno[3,2-c]pyridinyl, thieno[2,3-d]pyrimidinyl, 1H-pyrrolo[2,3-b]pyridinyl, 1H-pyrrolo[2,3-c]pyridinyl, pyrrolo[1,2-a]pyrimidinyl, pyrrolo[1,2-a]pyrazinyl, pyrrolo[1,2-b]pyridazinyl, pyrazolo[1,5-a]pyridinyl, pyrazolo[1,5-a]pyrazinyl, imidazo[1,2-a]pyridinyl, imidazo[1,2-a]pyrimidinyl, imidazo[1,2-c]pyrimidinyl, imidazo[1,2-b]pyridazinyl, imidazo[1,2-a]pyrazinyl, imidazo[2,1-b][1,3]thiazolyl, imidazo[2,1-b][1,3,4]thiadiazolyl, [1,3]oxazolo[4,5-b]pyridinyl or quinoxalinyl; wherein, each instance of heteroaryl is optionally substituted with R₆ and R₇ substituents.

[0631] In one embodiment of the use of a compound of Formula (I), R₂ is heteroaryl-amino, wherein heteroaryl is selected from pyridinyl or pyrimidinyl; and, wherein, each instance of heteroaryl is optionally substituted with R₆ and R₇ substituents.

[0632] In another embodiment of the use of a compound of Formula (I), R₂ is heteroaryl-amino selected from pyridin-2-yl-amino, pyridin-3-yl-amino or pyrimidin-2-yl-amino; wherein, each instance of heteroaryl is optionally substituted with R₆ and R₇ substituents.

[0633] In one embodiment of the use of a compound of Formula (I), R₆ is selected from halogen, hydroxy, cyano, nitro, C₁₋₈alkyl, halo-C₁₋₈alkyl, hydroxy-C₁₋₈alkyl, C₁₋₈alkoxy, halo-C₁₋₈alkoxy, C₁₋₈alkoxy-C₁₋₈alkyl, (C₁₋₈alkyl)₂-amino or C₁₋₈alkyl-thio; wherein, halogen and halo is selected from fluoro, chloro, bromo or iodo.

[0634] In one embodiment of the use of a compound of Formula (I), R₆ is C₁₋₈alkyl selected from methyl, ethyl, propyl, isopropyl or tert-butyl.

[0635] In another embodiment of the use of a compound of Formula (I), R₆ is C₁₋₈alkyl selected from ethyl, propyl, isopropyl or tert-butyl.

[0636] In one embodiment of the use of a compound of Formula (I), R₆ is C₂₋₈alkenyl selected from ethenyl, allyl or buta-1,3-dienyl.

[0637] In another embodiment of the use of a compound of Formula (I), R₆ is C₂₋₈alkenyl selected from ethenyl or allyl.

[0638] In one embodiment of the use of a compound of Formula (I), R₆ is halo-C₁₋₈alkyl selected from trihalo-methyl, dihalo-methyl, halo-methyl, trihalo-ethyl, dihalo-ethyl, halo-ethyl, trihalo-propyl, dihalo-propyl or halo-propyl; wherein, halo is selected from fluoro, chloro, bromo or iodo.

[0639] In one embodiment of the use of a compound of Formula (I), R₆ is hydroxy-C₁₋₈alkyl selected from hydroxy-methyl, hydroxy-ethyl, hydroxy-propyl, dihydroxy-propyl, hydroxy-butyl or dihydroxy-butyl.

[0640] In another embodiment of the use of a compound of Formula (I), R₆ is hydroxy-C₁₋₈alkyl selected from hydroxy-methyl, dihydroxy-propyl, hydroxy-butyl or dihydroxy-butyl.

[0641] In one embodiment of the use of a compound of Formula (I), R₆ is C₁₋₈alkoxy selected from methoxy, ethoxy, propoxy or isopropoxy.

[0642] In one embodiment of the use of a compound of Formula (I), R₆ is halo-C₁₋₈alkoxy selected from trihalo-methoxy, dihalo-methoxy, halo-methoxy, trihalo-ethoxy, dihalo-ethoxy, halo-ethoxy, trihalo-propoxy, dihalo-propoxy or halo-propoxy; wherein, halo is selected from fluoro, chloro, bromo or iodo.

[0643] In one embodiment of the use of a compound of Formula (I), R₇ is C₃₋₁₄cycloalkyl, C₃₋₁₄cycloalkyl-oxy, aryl, heterocyclyl or heteroaryl; wherein C₃₋₁₄cycloalkyl is selected from cyclopropyl or cyclobutoxy; wherein aryl is selected from phenyl; wherein heterocyclyl is selected from oxetanyl, pyrrolidinyl or 1,2,3,6-tetrahydropyridinyl; and, wherein heteroaryl is selected from thienyl or pyridinyl.

[0644] In another embodiment of the use of a compound of Formula (I), R₇ is C₃₋₁₄cycloalkyl or C₃₋₁₄cycloalkyl-oxy, wherein each instance of C₃₋₁₄cycloalkyl is selected from cyclopropyl, cyclobutyl, cyclopentyl, cyclohexyl or cycloheptyl.

[0645] In another embodiment of the use of a compound of Formula (I), R₇ is C₃₋₈cycloalkyl or C₃₋₈cycloalkyl-oxy, wherein each instance of C₃₋₈cycloalkyl is selected from cyclopropyl, cyclobutyl, cyclopentyl, cyclohexyl or cycloheptyl.

[0646] In one embodiment of the use of a compound of Formula (I), R₇ is aryl selected from phenyl.

[0647] In one embodiment of the use of a compound of Formula (I), R₇ is heterocyclyl selected from oxetanyl, pyrrolidinyl or 1,2,3,6-tetrahydropyridinyl.

[0648] In another embodiment of the use of a compound of Formula (I), R₇ is heterocyclyl selected from oxetan-3-yl, pyrrolidin-1-yl or 1,2,3,6-tetrahydropyridin-4-yl.

[0649] In one embodiment of the use of a compound of Formula (I), R₇ is heteroaryl selected from thienyl or pyridinyl.

[0650] In another embodiment of the use of a compound of Formula (I), R₇ is heteroaryl selected from pyridinyl.

[0651] In one embodiment of the use of a compound of Formula (I), R₇ is heteroaryl selected from thien-2-yl or pyridin-2-yl.

[0652] In another embodiment of the use of a compound of Formula (I), R₇ is heteroaryl selected from pyridin-2-yl.

[0653] In one embodiment of the use of a compound of Formula (I), R_{c} is hydrogen or C₁₋₈alkyl.

[0654] In another embodiment of the use of a compound of Formula (I),

[0655] R₁ is heterocyclyl, heterocyclyl-C₁₋₈alkyl, heterocyclyl-C₁₋₈alkoxy, heterocyclyl-amino, (heterocyclyl)(C₁₋₈alkyl)amino, heterocyclyl-amino-C₁₋₈alkyl, heterocyclyl-C₁₋₈alkyl-amino, (heterocyclyl-C₁₋₈alkyl)₂-amino, (heterocyclyl-C₁₋₈alkyl)(C₁₋₈alkyl)amino, heterocyclyl-C₁₋₈alkyl-amino-C₁₋₈alkyl, (heterocyclyl-C₁₋₈alkyl)₂-amino-C₁₋₈alkyl, (heterocyclyl-C₁₋₈alkyl)(C₁₋₈alkyl)amino-C₁₋₈alkyl, heterocyclyl-oxy, heterocyclyl-carbonyl, heterocyclyl-carbonyl-oxy, C₃₋₁₄cycloalkyl, aryl-C₁₋₈alkyl-amino, (aryl-C₁₋₈alkyl)₂-amino, (aryl-C₁₋₈alkyl)(C₁₋₈alkyl)amino, aryl-C₁₋₈alkyl-amino-C₁₋₈alkyl, (aryl-C₁₋₈alkyl)₂-amino-C₁₋₈alkyl, (aryl-C₁₋₈alkyl)(C₁₋₈alkyl)amino-C₁₋₈alkyl, heteroaryl, heteroaryl-C₁₋₈alkyl, heteroaryl-C₁₋₈alkoxy, heteroaryl-amino, heteroaryl-C₁₋₈alkyl-amino, (heteroaryl-C₁₋₈alkyl)₂-amino, (heteroaryl-C₁₋₈alkyl)(C₁₋₈alkyl)amino, heteroaryl-C₁₋₈alkyl-amino-C₁₋₈alkyl, (heteroaryl-C₁₋₈alkyl)₂-amino-C₁₋₈alkyl or (heteroaryl-C₁₋₈alkyl)(C₁₋₈alkyl)amino-C₁₋₈alkyl; wherein, each instance of heterocyclyl, C₃₋₁₄cycloalkyl, aryl and heteroaryl is optionally substituted with R₃ and R₄ substituents; and,

[0656] wherein, heterocyclyl is selected from azetidinyl, tetrahydrofuranyl, pyrrolidinyl, piperidinyl, piperazinyl, 1,4-diazepanyl, 1,2,5,6-tetrahydropyridinyl, 1,2,3,6-tetrahydropyridinyl, hexahydropyrrolo[3,4-b]pyrrol-(1H)-yl, (3aS,6aS)-hexahydropyrrolo[3,4-b]pyrrol-(1H)-yl, (3aR,6aR)-hexahydropyrrolo[3,4-b]pyrrol-(1H)-yl, hexahydropyrrolo[3,4-b]pyrrol-(2H)-yl, (3aS,6aS)-hexahydropyrrolo[3,4-b]pyrrol-(2H)-yl, hexahydropyrrolo[3,4-c]pyrrol-(1H)-yl, (3aR,6aS)-hexahydropyrrolo[3,4-c]pyrrol-(1H)-yl, octahydro-5H-pyrrolo[3,2-c]pyridinyl, octahydro-6H-pyrrolo[3,4-b]pyridinyl, (4aR,7aR)-octahydro-6H-pyrrolo[3,4-b]pyridinyl, (4aS,7aS)-octahydro-6H-pyrrolo[3,4-b]pyridinyl, hexahydropyrrolo[1,2-a]pyrazin-(2H)-one, hexahydropyrrolo[1,2-a]pyrazin-(1H)-yl, (7R,8aS)-hexahydropyrrolo[1,2-a]pyrazin-(1H)-yl, (8aS)-hexahydropyrrolo[1,2-a]pyrazin-(1H)-yl, (8aR)-hexahydropyrrolo[1,2-a]pyrazin-(1H)-yl, (8aS)-octahydropyrrolo[1,2-a]pyrazin-(1H)-yl, (8aR)-octahydropyrrolo[1,2-a]pyrazin-(1H)-yl, octahydro-2H-pyrido[1,2-a]pyrazinyl, 3-azabicyclo[3.1.0]hexyl, (1R,5S)-3-azabicyclo[3.1.0]hexyl, 8-azabicyclo[3.2.1]octyl, (1R,5S)-8-azabicyclo[3.2.1]octyl, 8-azabicyclo[3.2.1]oct-2-enyl, (1R,5S)-8-azabicyclo[3.2.1]oct-2-enyl, 9-azabicyclo[3.3.1]nonyl, (1R,5S)-9-azabicyclo[3.3.1]nonyl, 2,5-diazabicyclo[2.2.1]heptyl, (1S,4S)-2,5-diazabicyclo[2.2.1]heptyl, 2,5-diazabicyclo[2.2.2]octyl, 3,8-diazabicyclo[3.2.1]octyl, (1R,5S)-3,8-diazabicyclo[3.2.1]octyl, 1,4-diazabicyclo[3.2.2]nonyl, azaspiro[3.3]heptyl, 2,6-diazaspiro[3.3]heptyl, 2,7-diazaspiro[3.5]nonyl, 5,8-diazaspiro[3.5]nonyl, 2,7-diazaspiro[4.4]nonyl or 6,9-diazaspiro[4.5]decyl.

[0657] In another embodiment of the use of a compound of Formula (I),

[0658] R₂ is aryl, aryl-amino, aryl-amino-carbonyl, heterocyclyl, heteroaryl or heteroaryl-amino;

[0659] wherein, aryl is phenyl;

[0660] wherein, heterocyclyl is selected from 1,2,3,6-tetrahydropyridinyl, 1,3-benzodioxolyl or 2,3-dihydro-1,4-benzodioxinyl;

[0661] wherein, heteroaryl is selected from thienyl, 1H-pyrazolyl, 1H-imidazolyl, 1,3-thiazolyl, 1,2,4-oxadiazolyl, 1,3,4-oxadiazolyl, pyridinyl, pyrimidinyl, 1H-indolyl, 2H-indolyl, 1H-indazolyl, 2H-indazolyl, indolizinyl, benzofuranyl, benzothienyl, 1H-benzimidazolyl, 1,3-benzothiazolyl, 1,3-benzoxazolyl, 9H-purinyl, furo[3,2-b]pyridinyl, furo[3,2-c]pyridinyl, furo[2,3-c]pyridinyl, thieno[3,2-c]pyridinyl, thieno[2,3-d]pyrimidinyl, 1H-pyrrolo[2,3-b]pyridinyl, 1H-pyrrolo[2,3-c]pyridinyl, pyrrolo[1,2-a]pyrimidinyl, pyrrolo[1,2-a]pyrazinyl, pyrrolo[1,2-b]pyridazinyl, pyrazolo[1,5-a]pyridinyl, pyrazolo[1,5-a]pyrazinyl, imidazo[1,2-a]pyridinyl, imidazo[1,2-a]pyrimidinyl, imidazo[1,2-c]pyrimidinyl, imidazo[1,2-b]pyridazinyl, imidazo[1,2-a]pyrazinyl, imidazo[2,1-b][1,3]thiazolyl, imidazo[2,1-b][1,3,4]thiadiazolyl, [1,3]oxazolo[4,5-b]pyridinyl or quinoxalinyl; and, wherein, each instance of aryl, heterocyclyl and heteroaryl is optionally substituted with R₆ and R₇ substituents.

[0662] In another embodiment of the use of a compound of Formula (I),

[0663] R₁ is heterocyclyl, heterocyclyl-C₁₋₈alkyl, heterocyclyl-C₁₋₈alkoxy, heterocyclyl-amino, (heterocyclyl)(C₁₋₈alkyl)amino, heterocyclyl-amino-C₁₋₈alkyl, heterocyclyl-C₁₋₈alkyl-amino, (heterocyclyl-C₁₋₈alkyl)₂-amino, (heterocyclyl-C₁₋₈alkyl)(C₁₋₈alkyl)amino, heterocyclyl-C₁₋₈alkyl-amino-C₁₋₈alkyl, (heterocyclyl-C₁₋₈alkyl)₂-amino-C₁₋₈alkyl, (heterocyclyl-C₁₋₈alkyl)(C₁₋₈alkyl)amino-C₁₋₈alkyl, heterocyclyl-oxy, heterocyclyl-carbonyl, heterocyclyl-carbonyl-oxy, C₃₋₁₄cycloalkyl, aryl-C₁₋₈alkyl-amino, (aryl-C₁₋₈alkyl)₂-amino, (aryl-C₁₋₈alkyl)(C₁₋₈alkyl)amino, aryl-C₁₋₈alkyl-amino-C₁₋₈alkyl, (aryl-C₁₋₈alkyl)₂-amino-C₁₋₈alkyl, (aryl-C₁₋₈alkyl)(C₁₋₈alkyl)amino-C₁₋₈alkyl, heteroaryl, heteroaryl-C₁₋₈alkyl, heteroaryl-C₁₋₈alkoxy, heteroaryl-amino, heteroaryl-C₁₋₈alkyl-amino, (heteroaryl-C₁₋₈alkyl)₂-amino, (heteroaryl-C₁₋₈alkyl)(C₁₋₈alkyl)amino, heteroaryl-C₁₋₈alkyl-amino-C₁₋₈alkyl, (heteroaryl-C₁₋₈alkyl)₂-amino-C₁₋₈alkyl or (heteroaryl-C₁₋₈alkyl)(C₁₋₈alkyl)amino-C₁₋₈alkyl;

[0664] wherein, heterocyclyl is selected from azetidinyl, tetrahydrofuranyl, pyrrolidinyl, piperidinyl, piperazinyl, 1,4-diazepanyl, 1,2,5,6-tetrahydropyridinyl, 1,2,3,6-tetrahydropyridinyl, hexahydropyrrolo[3,4-b]pyrrol-(1H)-yl, (3aS,6aS)-hexahydropyrrolo[3,4-b]pyrrol-(1H)-yl, (3aR,6aR)-hexahydropyrrolo[3,4-b]pyrrol-(1H)-yl, hexahydropyrrolo[3,4-b]pyrrol-(2H)-yl, (3aS,6aS)-hexahydropyrrolo[3,4-b]pyrrol-(2H)-yl, hexahydropyrrolo[3,4-c]pyrrol-(1H)-yl, (3aR,6aS)-hexahydropyrrolo[3,4-c]pyrrol-(1H)-yl, octahydro-5H-pyrrolo[3,2-c]pyridinyl, octahydro-6H-pyrrolo[3,4-b]pyridinyl, (4aR,7aR)-octahydro-6H-pyrrolo[3,4-b]pyridinyl, (4aS,7aS)-octahydro-6H-pyrrolo[3,4-b]pyridinyl, hexahydropyrrolo[1,2-a]pyrazin-(2H)-one, hexahydropyrrolo[1,2-a]pyrazin-(1H)-yl, (7R,8aS)-hexahydropyrrolo[1,2-a]pyrazin-(1H)-yl, (8aS)-hexahydropyrrolo[1,2-a]pyrazin-(1H)-yl, (8aR)-hexahydropyrrolo[1,2-a]pyrazin-(1H)-yl, (8aS)-octahydropyrrolo[1,2-a]pyrazin-(1H)-yl, (8aR)-octahydropyrrolo[1,2-a]pyrazin-(1H)-yl, octahydro-2H-pyrido[1,2-a]pyrazinyl, 3-azabicyclo[3.1.0]hexyl, (1R,5S)-3-azabicyclo[3.1.0]hexyl, 8-azabicyclo[3.2.1]octyl, (1R,5S)-8-azabicyclo[3.2.1]octyl, 8-azabicyclo[3.2.1]oct-2-enyl, (1R,5S)-8-azabicyclo[3.2.1]oct-2-enyl, 9-azabicyclo[3.3.1]nonyl, (1R,5S)-9-azabicyclo[3.3.1]nonyl, 2,5-diazabicyclo[2.2.1]heptyl, (1S,4S)-2,5-diazabicyclo[2.2.1]heptyl, 2,5-diazabicyclo[2.2.2]octyl, 3,8-diazabicyclo[3.2.1]octyl, (1R,5S)-3,8-diazabicyclo[3.2.1]octyl, 1,4-diazabicyclo[3.2.2]nonyl, azaspiro[3.3]heptyl, 2,6-diazaspiro[3.3]heptyl, 2,7-diazaspiro[3.5]nonyl, 5,8-diazaspiro[3.5]nonyl, 2,7-diazaspiro[4.4]nonyl or 6,9-diazaspiro[4.5]decyl; and, wherein, each instance of heterocyclyl, C3.4cycloalkyl, aryl and heteroaryl is optionally substituted with R₃ and R₄ substituents; and

[0665] R₂ is aryl, aryl-amino, aryl-amino-carbonyl, heterocyclyl, heteroaryl or heteroaryl-amino;

[0666] wherein, heterocyclyl is selected from 1,2,3,6-tetrahydropyridin-4-yl, 1,3-benzodioxol-5-yl or 2,3-dihydro-1,4-benzodioxin-6-yl;

[0667] wherein, heteroaryl is selected from thienyl, 1H-pyrazolyl, 1H-imidazolyl, 1,3-thiazolyl, 1,2,4-oxadiazolyl, 1,3,4-oxadiazolyl, pyridinyl, pyrimidinyl, 1H-indolyl, 2H-indolyl, 1H-indazolyl, 2H-indazolyl, indolizinyl, benzofuranyl, benzothienyl, 1H-benzimidazolyl, 1,3-benzothiazolyl, 1,3-benzoxazolyl, 9H-purinyl, furo[3,2-b]pyridinyl, furo[3,2-c]pyridinyl, furo[2,3-c]pyridinyl, thieno[3,2-c]pyridinyl, thieno[2,3-d]pyrimidinyl, 1H-pyrrolo[2,3-b]pyridinyl, 1H-pyrrolo[2,3-c]pyridinyl, pyrrolo[1,2-a]pyrimidinyl, pyrrolo[1,2-a]pyrazinyl, pyrrolo[1,2-b]pyridazinyl, pyrazolo[1,5-a]pyridinyl, pyrazolo[1,5-a]pyrazinyl, imidazo[1,2-a]pyridinyl, imidazo[1,2-a]pyrimidinyl, imidazo[1,2-c]pyrimidinyl, imidazo[1,2-b]pyridazinyl, imidazo[1,2-a]pyrazinyl, imidazo[2,1-b][1,3]thiazolyl, imidazo[2,1-b][1,3,4]thiadiazolyl, [1,3]oxazolo[4,5-b]pyridinyl or quinoxalinyl; and, wherein, each instance of heterocyclyl and heteroaryl is optionally substituted with R₆ and R₇ substituents.

[0668] In another embodiment of the use of a compound of Formula (I),

[0669] R₁ is C₁₋₈alkyl, amino, C₁₋₈alkyl-amino, (C₁₋₈alkyl)₂-amino, C₁₋₈alkoxy-C₁₋₈alkyl-amino, (C₁₋₈alkoxy-C₁₋₈alkyl)₂-amino, (C₁₋₈alkoxy-C₁₋₈alkyl)(C₁₋₈alkyl)amino, amino-C₁₋₈alkyl, C₁₋₈alkyl-amino-C₁₋₈alkyl, (C₁₋₈alkyl)₂-amino-C₁₋₈alkyl, C₁₋₈alkoxy-C₁₋₈alkyl-amino-C₁₋₈alkyl, (C₁₋₈alkoxy-C₁₋₈alkyl)₂-amino-C₁₋₈alkyl, (C₁₋₈alkoxy-C₁₋₈alkyl)(C₁₋₈alkyl)amino-C₁₋₈alkyl, amino-C₁₋₈alkyl-amino, (amino-C₁₋₈alkyl)₂-amino, (amino-C₁₋₈alkyl)(C₁₋₈alkyl)amino, C₁₋₈alkyl-amino-C₁₋₈alkyl-amino, (C₁₋₈alkyl-amino-C₁₋₈alkyl)₂-amino, (C₁₋₈alkyl-amino-C₁₋₈alkyl)(C₁₋₈alkyl)amino, (C₁₋₈alkyl)₂-amino-C₁₋₈alkyl-amino, [(C₁₋₈alkyl)₂-amino-C₁₋₈alkyl](C₁₋₈alkyl)amino, amino-C₁₋₈alkoxy, C₁₋₈alkyl-amino-C₁₋₈alkoxy, (C₁₋₈alkyl)₂-amino-C₁₋₈alkoxy, C₁₋₈alkoxy-C₁₋₈alkyl-amino-C₁₋₈alkoxy, (C₁₋₈alkoxy-C₁₋₈alkyl)₂-amino-C₁₋₈alkoxy, (C₁₋₈alkoxy-C₁₋₈alkyl)(C₁₋₈alkyl)amino-C₁₋₈alkoxy, amino-C₂₋₈alkenyl, C₁₋₈alkyl-amino-C₂₋₈alkenyl, (C₁₋₈alkyl)₂-amino-C₂₋₈alkenyl, amino-C₂₋₈alkynyl, C₁₋₈alkyl-amino-C₂₋₈alkynyl, (C₁₋₈alkyl)₂-amino-C₂₋₈alkynyl, halo-C₁₋₈alkyl-amino, (halo-C₁₋₈alkyl)₂-amino, (halo-C₁₋₈alkyl)(C₁₋₈alkyl)amino, hydroxy-C₁₋₈alkyl, hydroxy-C₁₋₈alkoxy-C₁₋₈alkyl, hydroxy-C₁₋₈alkyl-amino, (hydroxy-C₁₋₈alkyl)₂-amino, (hydroxy-C₁₋₈alkyl)(C₁₋₈alkyl)amino, hydroxy-C₁₋₈alkyl-amino-C₁₋₈alkyl, (hydroxy-C₁₋₈alkyl)₂-amino-C₁₋₈alkyl, (hydroxy-C₁₋₈alkyl)(C₁₋₈alkyl)amino-C₁₋₈alkyl, hydroxy-C₁₋₈alkyl-amino-C₁₋₈alkoxy, (hydroxy-C₁₋₈alkyl)₂-amino-C₁₋₈alkoxy, (hydroxy-C₁₋₈alkyl)(C₁₋₈alkyl)amino-C₁₋₈alkoxy, hydroxy-C₁₋₈alkyl-amino-C₁₋₈alkyl-amino, (hydroxy-C₁₋₈alkyl-amino-C₁₋₈alkyl)₂-amino, (hydroxy-C₁₋₈alkyl)₂-amino-C₁₋₈alkyl-amino, (hydroxy-C₁₋₈alkyl-amino-C₁₋₈alkyl)(C₁₋₈alkyl)amino, (hydroxy-C₁₋₈alkyl)(C₁₋₈alkyl)amino-C₁₋₈alkyl-amino, [(hydroxy-C₁₋₈alkyl)₂-amino-C₁₋₈alkyl](C₁₋₈alkyl)amino or [(hydroxy-C₁₋₈alkyl)(C₁₋₈alkyl)amino-C₁₋₈alkyl](C₁₋₈alkyl)amino; and

[0670] R₂ is aryl, aryl-amino, aryl-amino-carbonyl, heterocyclyl, heteroaryl or heteroaryl-amino, wherein, each instance of aryl, heterocyclyl and heteroaryl is optionally substituted with R₆ and R₇ substituents.

[0671] In another embodiment of the use of a compound of Formula (I),

[0672] R₁ is heterocyclyl, heterocyclyl-C₁₋₈alkyl, heterocyclyl-C₁₋₈alkoxy, heterocyclyl-amino, (heterocyclyl)(C₁₋₈alkyl)amino, heterocyclyl-amino-C₁₋₈alkyl, heterocyclyl-C₁₋₈alkyl-amino, (heterocyclyl-C₁₋₈alkyl)₂-amino, (heterocyclyl-C₁₋₈alkyl)(C₁₋₈alkyl)amino, heterocyclyl-C₁₋₈alkyl-amino-C₁₋₈alkyl, (heterocyclyl-C₁₋₈alkyl)₂-amino-C₁₋₈alkyl, (heterocyclyl-C₁₋₈alkyl)(C₁₋₈alkyl)amino-C₁₋₈alkyl, heterocyclyl-oxy, heterocyclyl-carbonyl, heterocyclyl-carbonyl-oxy, C₃₋₁₄cycloalkyl, aryl-C₁₋₈alkyl-amino, (aryl-C₁₋₈alkyl)₂-amino, (aryl-C₁₋₈alkyl)(C₁₋₈alkyl)amino, aryl-C₁₋₈alkyl-amino-C₁₋₈alkyl, (aryl-C₁₋₈alkyl)₂-amino-C₁₋₈alkyl, (aryl-C₁₋₈alkyl)(C₁₋₈alkyl)amino-C₁₋₈alkyl, heteroaryl, heteroaryl-C₁₋₈alkyl, heteroaryl-C₁₋₈alkoxy, heteroaryl-amino, heteroaryl-C₁₋₈alkyl-amino, (heteroaryl-C₁₋₈alkyl)₂-amino, (heteroaryl-C₁₋₈alkyl)(C₁₋₈alkyl)amino, heteroaryl-C₁₋₈alkyl-amino-C₁₋₈alkyl, (heteroaryl-C₁₋₈alkyl)₂-amino-C₁₋₈alkyl or (heteroaryl-C₁₋₈alkyl)(C₁₋₈alkyl)amino-C₁₋₈alkyl; wherein, each instance of heterocyclyl, C₃₋₁₄cycloalkyl, aryl and heteroaryl is optionally substituted with R₃ and R₄ substituents; and

[0673] R₂ is aryl, aryl-amino, aryl-amino-carbonyl, heterocyclyl, heteroaryl or heteroaryl-amino, wherein, each instance of aryl, heterocyclyl and heteroaryl is optionally substituted with R₆ and R₇ substituents.

[0674] In another embodiment of the use of a compound of Formula (I),

[0675] R₁ is heterocyclyl, heterocyclyl-C₁₋₈alkyl, heterocyclyl-C₁₋₈alkoxy, heterocyclyl-amino, (heterocyclyl)(C₁₋₈alkyl)amino, heterocyclyl-amino-C₁₋₈alkyl, heterocyclyl-C₁₋₈alkyl-amino, (heterocyclyl-C₁₋₈alkyl)₂-amino, (heterocyclyl-C₁₋₈alkyl)(C₁₋₈alkyl)amino, heterocyclyl-C₁₋₈alkyl-amino-C₁₋₈alkyl, (heterocyclyl-C₁₋₈alkyl)₂-amino-C₁₋₈alkyl, (heterocyclyl-C₁₋₈alkyl)(C₁₋₈alkyl)amino-C₁₋₈alkyl, heterocyclyl-oxy, heterocyclyl-carbonyl or heterocyclyl-carbonyl-oxy; wherein, each instance of heterocyclyl is optionally substituted with R₃ and R₄ substituents; and

[0676] R₂ is aryl, aryl-amino, aryl-amino-carbonyl, heterocyclyl, heteroaryl or heteroaryl-amino, wherein, each instance of aryl, heterocyclyl and heteroaryl is optionally substituted with R₆ and R₇ substituents.

[0677] In another embodiment of the use of a compound of Formula (I),

[0678] R₁ is heterocyclyl optionally substituted with R₃ and R₄ substituents; and

[0679] R₂ is aryl, aryl-amino, aryl-amino-carbonyl, heterocyclyl, heteroaryl or heteroaryl-amino, wherein, each instance of aryl, heterocyclyl and heteroaryl is optionally substituted with R₆ and R₇ substituents.

[0680] In another embodiment of the use of a compound of Formula (I),

[0681] R₁ is C₃₋₁₄cycloalkyl optionally substituted with R₃ and R₄ substituents; and

[0682] R₂ is aryl, aryl-amino, aryl-amino-carbonyl, heterocyclyl, heteroaryl or heteroaryl-amino, wherein, each instance of aryl, heterocyclyl and heteroaryl is optionally substituted with R₆ and R₇ substituents.

[0683] In another embodiment of the use of a compound of Formula (I),

[0684] R₁ is aryl-C₁₋₈alkyl-amino, (aryl-C₁₋₈alkyl)₂-amino, (aryl-C₁₋₈alkyl)(C₁₋₈alkyl)amino, aryl-C₁₋₈alkyl-amino-C₁₋₈alkyl, (aryl-C₁₋₈alkyl)₂-amino-C₁₋₈alkyl or (aryl-C₁₋₈alkyl)(C₁₋₈alkyl)amino-C₁₋₈alkyl; wherein, each instance of aryl is optionally substituted with R₃ and R₄ substituents; and

[0685] R₂ is aryl, aryl-amino, aryl-amino-carbonyl, heterocyclyl, heteroaryl or heteroaryl-amino, wherein, each instance of aryl, heterocyclyl and heteroaryl is optionally substituted with R₆ and R₇ substituents.

[0686] In another embodiment of the use of a compound of Formula (I),

[0687] R₁ is aryl-C₁₋₈alkyl-amino optionally substituted with R₃ and R₄ substituents; and

[0688] R₂ is aryl, aryl-amino, aryl-amino-carbonyl, heterocyclyl, heteroaryl or heteroaryl-amino, wherein, each instance of aryl, heterocyclyl and heteroaryl is optionally substituted with R₆ and R₇ substituents.

[0689] In another embodiment of the use of a compound of Formula (I),

[0690] R₁ is heteroaryl, heteroaryl-C₁₋₈alkyl, heteroaryl-C₁₋₈alkoxy, heteroaryl-amino, heteroaryl-C₁₋₈alkyl-amino, (heteroaryl-C₁₋₈alkyl)₂-amino, (heteroaryl-C₁₋₈alkyl)(C₁₋₈alkyl)amino, heteroaryl-C₁₋₈alkyl-amino-C₁₋₈alkyl, (heteroaryl-C₁₋₈alkyl)₂-amino-C₁₋₈alkyl or (heteroaryl-C₁₋₈alkyl)(C₁₋₈alkyl)amino-C₁₋₈alkyl; wherein, each instance of heterocyclyl, C₃₋₁₄cycloalkyl, aryl and heteroaryl is optionally substituted with R₃ and R₄ substituents; and

[0691] R₂ is aryl, aryl-amino, aryl-amino-carbonyl, heterocyclyl, heteroaryl or heteroaryl-amino, wherein, each instance of aryl, heterocyclyl and heteroaryl is optionally substituted with R₆ and R₇ substituents.

[0692] In another embodiment of the use of a compound of Formula (I),

[0693] R₁ is heteroaryl optionally substituted with R₃ and R₄ substituents; and

[0694] R₂ is aryl, aryl-amino, aryl-amino-carbonyl, heterocyclyl, heteroaryl or heteroaryl-amino, wherein, each instance of aryl, heterocyclyl and heteroaryl is optionally substituted with R₆ and R₇ substituents.

[0695] In one embodiment, the compound of Formula (I), used in a method disclosed herein, is a compound selected from Formula (II), Formula (III), Formula (IV), Formula (V), Formula (VI), Formula (VII), Formula (VIII), Formula (IX), Formula (X), Formula (XI), Formula (XII), Formula (XIII) or Formula (XIV):

[chemical structure]

[chemical structure]

[0696] or a form thereof.

[0697] In an embodiment of the use of the compound of Formula (I), w₃ is C—R₁, w₆ is C—R₂, w₁, w₄, w₅ and w₇ are independently C—Rₐ or N and w₂ is C—R_{b} or N.

[0698] In another embodiment of the use of the compound of Formula (I), w₃ is C—R₂, w₆ is C—R₁, w₁, w₄, w₅ and w₇ are independently C—Rₐ or N and w₂ is C—R_{b} or N.

[0699] In another embodiment of the use of the compound of Formula (I), w₄ is C—R₁, w₇ is C—R₂, w₁, w₃ and w₅ are independently C—Rₐ or N, w₂ is C—R_{b} or N and w₆ is C—R_{c} or N.

[0700] In another embodiment of the use of the compound of Formula (I), w₄ is C—R₂, w₇ is C—R₁, w₁, w₃ and w₅ are independently C—Rₐ or N, w₂ is C—R_{b} or N and w₆ is C—R_{c} or N.

[0701] In an embodiment of the use of the compound of Formula (II), w₃ is C—R₁, w₆ is C—R₂, w₄, w₅ and w₇ are independently C—Rₐ or N and w₂ is C—R_{b} or N.

[0702] In another embodiment of the use of the compound of Formula (II), w₃ is C—R₂, w₆ is C—R₁, w₄, w₅ and w₇ are independently C—Rₐ or N and w₂ is C—R_{b} or N.

[0703] In another embodiment of the use of the compound of Formula (II), w₄ is C—R₁, w₇ is C—R₂, w₃ and w₅ are independently C—Rₐ or N, w₂ is C—R_{b} or N and w₆ is C—R_{c} or N.

[0704] In another embodiment of the use of the compound of Formula (II), w₄ is C—R₂, w₇ is C—R₁, w₃ and w₅ are independently C—Rₐ or N, w₂ is C—R_{b} or N and w₆ is C—R_{c} or N.

[0705] In an embodiment of the use of the compound of Formula (III), w₃ is C—R₁, w₆ is C—R₂ and w₁, w₄, w₅ and w₇ are independently C—Rₐ or N.

[0706] In another embodiment of the use of the compound of Formula (III), w₃ is C—R₂, w₆ is C—R₁and w₁, w₄, w₅ and w₇ are independently C—Rₐ or N.

[0707] In another embodiment of the use of the compound of Formula (III), w₄ is C—R₁, w₇ is C—R₂, w₁, w₃ and w₅ are independently C—Rₐ or N and w₆ is C—R_{c} or N.

[0708] In another embodiment of the use of the compound of Formula (III), w₄ is C—R₂, w₇ is C—R₁, w₁, w₃ and w₅ are independently C—Rₐ or N and w₆ is C—R_{c} or N.

[0709] In an embodiment of the use of the compound of Formula (IV), w₄ is C—R₁, w₇ is C—R₂, w₁ and w₅ are independently C—Rₐ or N, w₂ is C—R_{b} or N and w₆ is C—R_{c} or N.

[0710] In another embodiment of the use of the compound of Formula (IV), w₄ is C—R₂, w₇ is C—R₁, w₁ and w₅ are independently C—Rₐ or N, w₂ is C—R_{b} or N and w₆ is C—R_{c} or N.

[0711] In an embodiment of the use of the compound of Formula (V), w₃ is C—R₁, w₆ is C—R₂, w₁, w₅ and w₇ are independently C—Rₐ or N and w₂ is C—R_{b} or N.

[0712] In another embodiment of the use of the compound of Formula (V), w₃ is C—R₂, w₆ is C—R₁, w₁, w₅ and w₇ are independently C—Rₐ or N and w₂ is C—R_{b} or N.

[0713] In an embodiment of the use of the compound of Formula (VI), w₃ is C—R₁, w₆ is C—R₂, w₁, w₄ and w₇ are independently C—Rₐ or N and w₂ is C—R_{b} or N.

[0714] In another embodiment of the use of the compound of Formula (VI), w₃ is C—R₂, w₆ is C—R₁, w₁, w₄ and w₇ are independently C—Rₐ or N and w₂ is C—R_{b} or N.

[0715] In another embodiment of the use of the compound of Formula (VI), w₄ is C—R₁, w₇ is C—R₂, w₁ and w₃ are independently C—Rₐ or N, w₂ is C—R_{b} or N and w₆ is C—R_{c} or N.

[0716] In another embodiment of the use of the compound of Formula (VI), w₄ is C—R₂, w₇ is C—R₁, w₁ and w₃ are independently C—Rₐ or N, w₂ is C—R_{b} or N and w₆ is C—R_{c} or N.

[0717] In another embodiment of the use of the compound of Formula (VII), w₄ is C—R₁, w₇ is C—R₂, w₁, w₃ and w₅ are C—Rₐ or N and w₂ is C—R₁ or N.

[0718] In another embodiment of the use of the compound of Formula (VII), w₄ is C—R₂, w₇ is C—R₁, w₁, w₃ and w₅ are C—Rₐ or N and w₂ is C—R_{b} or N.

[0719] In another embodiment of the use of the compound of Formula (VIII), w₃ is C—R₁, w₆ is C—R₂, w₁, w₄ and w₅ are C—Rₐ or N and w₂ is C—R_{b} or N.

[0720] In another embodiment of the use of the compound of Formula (VIII), w₃ is C—R₂, w₆ is C—R₁, w₁, w₄ and w₅ are C—Rₐ or N and w₂ is C—R_{b} or N.

[0721] In an embodiment of the use of the compound of Formula (IX), w₃ is C—R₁, w₆ is C—R₂, w₄ and w₇ are independently C—Rₐ or N and w₂ is C—R_{b} or N.

[0722] In another embodiment of the use of the compound of Formula (IX), w₃ is C—R₂, w₆ is C—R₁, w₄ and w₇ are independently C—Rₐ or N and w₂ is C—R_{b} or N.

[0723] In another embodiment of the use of the compound of Formula (IX), w₄ is C—R₁, w₇ is C—R₂, w₂ is C—R_{b} or N, w₃ is C—Rₐ or N and w₆ is C—R_{c} or N.

[0724] In another embodiment of the use of the compound of Formula (IX), w₄ is C—R₂, w₇ is C—R₁, w₂ is C—R_{b} or N, w₃ is C—Rₐ or N and w₆ is C—R_{c} or N.

[0725] In an embodiment of the use of the compound of Formula (X), w₃ is C—R₁, w₆ is C—R₂, w₂ is C—R_{b} or N and w₅ and w₇ are independently C—Rₐ or N.

[0726] In another embodiment of the use of the compound of Formula (X), w₃ is C—R₂, w₆ is C—R₁, w₂ is C—R₁ or N and w₅ and w₇ are independently C—Rₐ or N.

[0727] In an embodiment of the use of the compound of Formula (XI), w₄ is C—R₁, w₇ is C—R₂, w₂ is C—R_{b} or N, w₅ is C—Rₐ or N and w₆ is C—R_{c} or N.

[0728] In another embodiment of the use of the compound of Formula (XI), w₄ is C—R₂, w₇ is C—R₁, w₂ is C—R_{b} or N, w₅ is C—Rₐ or N and w₆ is C—R_{c} or N.

[0729] In an embodiment of the use of the compound of Formula (XII), w₃ is C—R₁, w₆ is C—R₂ and w₄, w₅ and w₇ are independently C—Rₐ or N.

[0730] In another embodiment of the use of the compound of Formula (XII), w₃ is C—R₂, w₆ is C—R₁and w₄, w₅ and w₇ are independently C—Rₐ or N.

[0731] In another embodiment of the use of the compound of Formula (XII), w₄ is C—R₁, w₇ is C—R₂, w₃ and w₅ are independently C—R_{c} or N and w₆ is C—R_{c} or N.

[0732] In another embodiment of the use of the compound of Formula (XII), w₄ is C—R₂, w₇ is C—R₁, w₃ and w₅ are independently C—R_{c} or N and w₆ is C—R_{c} or N.

[0733] In an embodiment of the use of the compound of Formula (XIII), w₃ is C—R₁, w₆ is C—R₂, w₂ is C—R_{b} or N and w₄ and w₅ are independently C—Rₐ or N.

[0734] In another embodiment of the use of the compound of Formula (XIII), w₃ is C—R₂, w₆ is C—R₁, w₂ is C—R_{b} or N and w₄ and w₅ are independently C—Rₐ or N.

[0735] In an embodiment of the use of the compound of Formula (XIV), w₄ is C—R₁, w₇ is C—R₂, w₂ is C—R_{b} or N and w₃ and w₅ are independently C—Rₐ or N.

[0736] In another embodiment of the use of the compound of Formula (XIV), w₄ is C—R₂, w₇ is C—R₁, w₂ is C—R_{b} or N and w₃ and w₅ are independently C—Rₐ or N.

[0737] In another embodiment, the compound of Formula (I) used in a method disclosed herein is a compound selected from Formula (II), Formula (III), Formula (IX), Formula (XI) or Formula (XII):

[chemical structure]

[0738] or a form thereof.

[0739] In another embodiment, the compound of Formula (I) used in a method disclosed herein is a compound of Formula (II):

[chemical structure]

[0740] or a form thereof.

[0741] In another embodiment, the compound of Formula (I) used in a method disclosed herein is a compound of Formula (III):

[chemical structure]

[0742] or a form thereof.

[0743] In another embodiment, the compound of Formula (I) used in a method disclosed herein is a compound of Formula (IV):

[chemical structure]

[0744] or a form thereof.

[0745] In another embodiment, the compound of Formula (I) used in a method disclosed herein is a compound of Formula (V):

[chemical structure]

[0746] or a form thereof.

[0747] In another embodiment, the compound of Formula (I) used in a method disclosed herein is a compound of Formula (VI):

[chemical structure]

[0748] or a form thereof.

[0749] In another embodiment, the compound of Formula (I) used in a method disclosed herein is a compound of Formula (VII):

[chemical structure]

[0750] or a form thereof.

[0751] In another embodiment, the compound of Formula (I) used in a method disclosed herein is a compound of Formula (VIII):

[chemical structure]

[0752] or a form thereof.

[0753] In another embodiment, the compound of Formula (I) used in a method disclosed herein is a compound of Formula (IX):

[chemical structure]

[0754] or a form thereof.

[0755] In another embodiment, the compound of Formula (I) used in a method disclosed herein is a compound of Formula (X):

[chemical structure]

[0756] or a form thereof.

[0757] In another embodiment, the compound of Formula (I) used in a method disclosed herein is a compound of Formula (XI):

[chemical structure]

[0758] or a form thereof.

[0759] In another embodiment, the compound of Formula (I) used in a method disclosed herein is a compound of Formula (XII):

[chemical structure]

[0760] or a form thereof.

[0761] In another embodiment, the compound of Formula (I) used in a method disclosed herein is a compound of Formula (XIII):

[chemical structure]

[0762] or a form thereof.

[0763] In another embodiment, the compound of Formula (I) used in a method disclosed herein is a compound of Formula (XIV):

[chemical structure]

[0764] or a form thereof.

[0765] In one embodiment, the compound of Formula (I), Formula (II), Formula (III), Formula (IV), Formula (V), Formula (VI), Formula (VII), Formula (VIII), Formula (IX), Formula (X), Formula (XI), Formula (XII), Formula (XIII) or Formula (XIV) used in a method disclosed herein is a compound selected from Formula (Ia), Formula (IIa), Formula (IIIa), Formula (IVa), Formula (Va), Formula (VIa), Formula (VIIa), Formula (VIIIa), Formula (IXa), Formula (Xa), Formula (XIa), Formula (XIIa), Formula (XIIIa) or Formula (XIVa), respectively:

[chemical structure]

[chemical structure]

[0766] or a form thereof.

[0767] In an embodiment of the use of the compound of Formula (Ia), one of w₃, w₄, w₆ and w₇ is C—R₁and one other of w₃, w₄, w₆ and w₇ is C—R₂, provided that,

[0768] when w₃ is C—R₁, then w₆ is C—R₂ and w₄ and w₇ are independently C—Rₐ or N; or,

[0769] when w₃ is C—R₂, then w₆ is C—R₁and w₄ and w₇ are independently C—Rₐ or N; or,

[0770] when w₄ is C—R₁, then w₇ is C—R₂ and w₃ is C—Rₐ or N and w₆ is C—R_{c} or N; or,

[0771] when w₄ is C—R₂, then w₇ is C—R₁and w₃ is C—Rₐ or N and w₆ is C—R_{c} or N.

[0772] In an embodiment of the use of the compound of Formula (IIa), one of w₃, w₄, w₆ and w₇ is C—R₁and one other of w₃, w₄, w₆ and w₇ is C—R₂, provided that,

[0773] when w₃ is C—R₁, then w₆ is C—R₂ and w₄ and w₇ are independently C—Rₐ or N; or,

[0774] when w₃ is C—R₂, then w₆ is C—R₁and w₄ and w₇ are independently C—Rₐ or N; or,

[0775] when w₄ is C—R₁, then w₇ is C—R₂ and w₃ is C—Rₐ or N and w₆ is C—R_{c} or N; or,

[0776] when w₄ is C—R₂, then w₇ is C—R₁and w₃ is C—Rₐ or N and w₆ is C—R_{c} or N.

[0777] In an embodiment of the use of the compound of Formula (IIa), one of w₃, w₄, w₆ and w₇ is C—R₁and one other of w₃, w₄, w₆ and w₇ is C—R₂, provided that,

[0778] when w₃ is C—R₁, then w₆ is C—R₂ and w₄ and w₇ are independently C—Rₐ or N; or,

[0779] when w₃ is C—R₂, then w₆ is C—R₁and w₄ and w₇ are independently C—Rₐ or N; or,

[0780] when w₄ is C—R₁, then w₇ is C—R₂ and w₃ is C—Rₐ or N and w₆ is C—R_{c} or N; or,

[0781] when w₄ is C—R₂, then w₇ is C—R₁and w₃ is C—Rₐ or N and w₆ is C—R_{c} or N.

[0782] In an embodiment of the use of the compound of Formula (IVa), one of w₆ and w₇ is C—R₁and the other is C—R₂, provided that, when w₄ is C—R₁, then w₇ is C—R₂; or, when w₄ is C—R₂, then w₇ is C—R₁.

[0783] In an embodiment of the use of the compound of Formula (Va), one of w₃ and w₆ is C—R₁and the other is C—R₂, provided that, when w₃ is C—R₁, then w₆ is C—R₂; or, when w₃ is C—R₂, then w₆ is C—R₁.

[0784] In an embodiment of the use of the compound of Formula (VIa), one of w₃, w₄, w₆ and w₇ is C—R₁and one other of w₃, w₄, w₆ and w₇ is C—R₂, provided that,

[0785] when w₃ is C—R₁, then w₆ is C—R₂ and w₄ and w₇ are independently C—Rₐ or N; or,

[0786] when w₃ is C—R₂, then w₆ is C—R₁and w₄ and w₇ are independently C—Rₐ or N; or,

[0787] when w₄ is C—R₁, then w₇ is C—R₂ and w₃ is C—Rₐ or N and w₆ is C—R_{c} or N; or,

[0788] when w₄ is C—R₂, then w₇ is C—R₁and w₃ is C—Rₐ or N and w₆ is C—R_{c} or N.

[0789] In an embodiment of the use of the compound of Formula (VIIa), one of w₄ and w₇ is C—R₁and the other is C—R₂, provided that, when w₄ is C—R₁, then w₇ is C—R₂; or, when w₄ is C—R₂, then w₇ is C—R₁.

[0790] In an embodiment of the use of the compound of Formula (VIIIa), one of w₃ and w₆ is C—R₁and the other is C—R₂, provided that, when w₃ is C—R₁, then w₆ is C—R₂; or, when w₃ is C—R₂, then w₆ is C—R₁.

[0791] In an embodiment of the use of the compound of Formula (IXa), one of w₃, w₄, w₆ and w₇ is C—R₁and one other of w₃, w₄, w₆ and w₇ is C—R₂, provided that,

[0792] when w₃ is C—R₁, then w₆ is C—R₂ and w₄ and w₇ are independently C—Rₐ or N; or,

[0793] when w₃ is C—R₂, then w₆ is C—R₁and w₄ and w₇ are independently C—Rₐ or N; or,

[0794] when w₄ is C—R₁, then w₇ is C—R₂ and w₃ is C—Rₐ or N and w₆ is C—R_{c} or N; or,

[0795] when w₄ is C—R₂, then w₇ is C—R₁and w₃ is C—Rₐ or N and w₆ is C—R_{c} or N.

[0796] In an embodiment of the use of the compound of Formula (Xa), one of w₃ and w₆ is C—R₁and the other is C—R₂, provided that, when w₃ is C—R₁, then w₆ is C—R₂; or, when w₃ is C—R₂, then w₆ is C—R₁.

[0797] In an embodiment of the use of the compound of Formula (XIa), one of w₄ and w₇ is C—R₁and the other is C—R₂, provided that, when w₄ is C—R₁, then w₇ is C—R₂; or, when w₄ is C—R₂, then w₇ is C—R₁.

[0798] In an embodiment of the use of the compound of Formula (XIIa), one of w₃, w₄, w₆ and w₇ is C—R₁and one other of w₃, w₄, w₆ and w₇ is C—R₂, provided that,

[0799] when w₃ is C—R₁, then w₆ is C—R₂ and w₄ and w₇ are independently C—Rₐ or N; or,

[0800] when w₃ is C—R₂, then w₆ is C—R₁and w₄ and w₇ are independently C—Rₐ or N; or,

[0801] when w₄ is C—R₁, then w₇ is C—R₂ and w₃ is C—Rₐ or N and w₆ is C—R_{c} or N; or,

[0802] when w₄ is C—R₂, then w₇ is C—R₁and w₃ is C—Rₐ or N and w₆ is C—R_{c} or N.

[0803] In an embodiment of the use of the compound of Formula (XIIIa), one of w₃ and w₆ is C—R₁and the other is C—R₂, provided that, when w₃ is C—R₁, then w₆ is C—R₂; or, when w₃ is C—R₂, then w₆ is C—R₁.

[0804] In an embodiment of the use of the compound of Formula (XIVa), one of w₄ and w₇ is C—R₁and the other is C—R₂, provided that, when w₆ is C—R₁, then w₇ is C—R₂; or, when w₄ is C—R₂, then w₇ is C—R₁.

[0805] In another embodiment, the compound of Formula (I), Formula (II), Formula (III), Formula (IX), Formula (XI) or Formula (XII), used in a method disclosed herein, is a compound selected from Formula (Ia), Formula (IIa), Formula (IIIa), Formula (IXa), Formula (XIa) or Formula (XIIa), respectively:

[chemical structure]

[0806] or a form thereof.

[0807] In another embodiment, the compound of Formula (I) used in a method disclosed herein is a compound of Formula (Ia):

[chemical structure]

[0808] or a form thereof.

[0809] In another embodiment, the compound of Formula (II) used in a method disclosed herein is a compound of Formula (IIa):

[chemical structure]

[0810] or a form thereof.

[0811] In another embodiment, the compound of Formula (III) used in a method disclosed herein is a compound of Formula (IIa):

[chemical structure]

[0812] or a form thereof.

[0813] In another embodiment, the compound of Formula (IV) used in a method disclosed herein is a compound of Formula (IVa):

[chemical structure]

[0814] or a form thereof.

[0815] In another embodiment, the compound of Formula (V) used in a method disclosed herein is a compound of Formula (Va):

[chemical structure]

[0816] or a form thereof.

[0817] In another embodiment, the compound of Formula (VI) used in a method disclosed herein is a compound of Formula (VIa):

[chemical structure]

[0818] or a form thereof.

[0819] In another embodiment, the compound of Formula (VII) used in a method disclosed herein is a compound of Formula (VIIa):

[chemical structure]

[0820] or a form thereof.

[0821] In another embodiment, the compound of Formula (VIII) used in a method disclosed herein is a compound of Formula (VIIIa):

[chemical structure]

[0822] or a form thereof.

[0823] In another embodiment, the compound of Formula (IX) used in a method disclosed herein is a compound of Formula (IXa):

[chemical structure]

[0824] or a form thereof.

[0825] In another embodiment, the compound of Formula (X) used in a method disclosed herein is a compound of Formula (Xa):

[chemical structure]

[0826] or a form thereof.

[0827] In another embodiment, the compound of Formula (XI) used in a method disclosed herein is a compound of Formula (XIa):

[chemical structure]

[0828] or a form thereof.

[0829] In another embodiment, the compound of Formula (XII) used in a method disclosed herein is a compound of Formula (XIIa):

[chemical structure]

[0830] or a form thereof.

[0831] In another embodiment, the compound of Formula (XIII) used in a method disclosed herein is a compound of Formula (XIIIa):

[chemical structure]

[0832] or a form thereof.

[0833] In another embodiment, the compound of Formula (XIV) used in a method disclosed herein is a compound of Formula (XIVa):

[chemical structure]

[0834] or a form thereof.

[0835] In one embodiment, the compound of Formula (Ia) used in a method disclosed herein is a compound of Formula (Ia1), Formula (Ia2), Formula (Ia3) or Formula (Ia4):

[chemical structure]

[0836] or a form thereof.

[0837] In one embodiment, the compound of Formula (IIa) used in a method disclosed herein is a compound of Formula (IIa1), Formula (IIa2), Formula (IIa3) or Formula (IIa4):

[chemical structure]

[0838] or a form thereof.

[0839] In one embodiment, the compound of Formula (IIIa) used in a method disclosed herein is a compound of Formula (IIIa1), Formula (IIIa2), Formula (IIIa3) or Formula (IIIa4):

[chemical structure]

[0840] or a form thereof.

[0841] In one embodiment, the compound of Formula (IVa) used in a method disclosed herein is a compound of Formula (IVa1) or Formula (IVa2):

[chemical structure]

[0842] or a form thereof.

[0843] In one embodiment, the compound of Formula (Va) used in a method disclosed herein is a compound of Formula (Va1) or Formula (Va2):

[chemical structure]

[0844] or a form thereof.

[0845] In one embodiment, the compound of Formula (VIa) used in a method disclosed herein is a compound of Formula VIa1 Formula VIa2 Formula VIa3 or Formula (VIa4):

[chemical structure]

[0846] or a form thereof.

[0847] In one embodiment, the compound of Formula (VIIa) used in a method disclosed herein is a compound Formula (VIIa1) of Formula (VIIa2)

[chemical structure]

[0848] or a form thereof.

[0849] In one embodiment, the compound of Formula (VIIIa) used in a method disclosed herein is a compound of Formula (VIIIa1) or Formula (VIIIa2):

[chemical structure]

[0850] or a form thereof.

[0851] In one embodiment, the compound of Formula (IXa) used in a method disclosed herein is a compound of Formula (IXa1), Formula (IXa2), Formula (IXa3) or Formula (IXa4):

[chemical structure]

[0852] or a form thereof.

[0853] In one embodiment, the compound of Formula (Xa) used in a method disclosed herein is a compound of Formula (Xa1) or Formula (Xa2):

[chemical structure]

[0854] or a form thereof.

[0855] In one embodiment, the compound of Formula (XIa) used in a method disclosed herein is a compound of Formula (Xia1) or Formula (Xia2):

[chemical structure]

[0856] or a form thereof.

[0857] In one embodiment, the compound of Formula (XIIa) used in a method disclosed herein is a compound of Formula (XIIa1), Formula (XIIa2), Formula (XIIa3) or Formula (XIIa4):

[chemical structure]

[0858] or a form thereof.

[0859] In one embodiment, the compound of Formula (XIIIa) used in a method disclosed herein is a compound of Formula (XIIIa1) or Formula (XIIIa2):

[chemical structure]

[0860] or a form thereof.

[0861] In one embodiment, the compound of Formula (XIVa) used in a method disclosed herein is a compound of Formula (XIVa1) or Formula (XIVa2):

[chemical structure]

[0862] or a form thereof.

[0863] In one embodiment, the compound of Formula (Ia) used in a method disclosed herein is a compound of Formula (Ia1):

[chemical structure]

[0864] or a form thereof.

[0865] In one embodiment, the compound of Formula (Ia) used in a method disclosed herein is a compound of Formula (Ia2):

[chemical structure]

[0866] or a form thereof.

[0867] In one embodiment, the compound of Formula (Ia) used in a method disclosed herein is a compound of Formula (Ia3):

[chemical structure]

[0868] or a form thereof.

[0869] In one embodiment, the compound of Formula (Ia) used in a method disclosed herein is a compound of Formula (Ia4):

[chemical structure]

[0870] or a form thereof.

[0871] In one embodiment, the compound of Formula (IIa) used in a method disclosed herein is a compound of Formula (IIa1):

[chemical structure]

[0872] or a form thereof.

[0873] In one embodiment, the compound of Formula (IIa) used in a method disclosed herein is a compound of Formula (IIa2):

[chemical structure]

[0874] or a form thereof.

[0875] In one embodiment, the compound of Formula (IIa) used in a method disclosed herein is a compound of Formula (IIa3):

[chemical structure]

[0876] or a form thereof.

[0877] In one embodiment, the compound of Formula (IIa) used in a method disclosed herein is a compound of Formula (IIa4):

[chemical structure]

[0878] or a form thereof.

[0879] In one embodiment, the compound of Formula (IIIa) used in a method disclosed herein is a compound of Formula (IIIa1):

[chemical structure]

[0880] or a form thereof.

[0881] In one embodiment, the compound of Formula (IIIa) used in a method disclosed herein is a compound of Formula (IIIa2):

[chemical structure]

[0882] or a form thereof.

[0883] In one embodiment, the compound of Formula (IIIa) used in a method disclosed herein is a compound of Formula (IIIa3):

[chemical structure]

[0884] or a form thereof.

[0885] In one embodiment, the compound of Formula (IIIa) used in a method disclosed herein is a compound of Formula (IIIa4):

[chemical structure]

[0886] or a form thereof.

[0887] In one embodiment, the compound of Formula (IVa) used in a method disclosed herein is a compound of Formula (IVa1):

[chemical structure]

[0888] or a form thereof.

[0889] In one embodiment, the compound of Formula (IVa) used in a method disclosed herein is a compound of Formula (IVa2):

[chemical structure]

[0890] or a form thereof.

[0891] In one embodiment, the compound of Formula (Va) used in a method disclosed herein is a compound of Formula (Va1):

[chemical structure]

[0892] or a form thereof.

[0893] In one embodiment, the compound of Formula (Va) used in a method disclosed herein is a compound of Formula (Va2):

[chemical structure]

[0894] or a form thereof.

[0895] In one embodiment, the compound of Formula (VIa) used in a method disclosed herein is a compound of Formula (VIa1):

[chemical structure]

[0896] or a form thereof.

[0897] In one embodiment, the compound of Formula (VIa) used in a method disclosed herein is a compound of Formula Formula (VIa2):

[chemical structure]

[0898] or a form thereof.

[0899] In one embodiment, the compound of Formula (VIa) used in a method disclosed herein is a compound of Formula Formula (VIa3):

[chemical structure]

[0900] or a form thereof.

[0901] In one embodiment, the compound of Formula (VIa) used in a method disclosed herein is a compound of Formula (VIa4):

[chemical structure]

[0902] or a form thereof.

[0903] In one embodiment, the compound of Formula (VIIa) used in a method disclosed herein is a compound of Formula (VIIa1):

[chemical structure]

[0904] or a form thereof.

[0905] In one embodiment, the compound of Formula (VIIa) used in a method disclosed herein is a compound of Formula (VIIa2):

[chemical structure]

[0906] or a form thereof.

[0907] In one embodiment, the compound of Formula (VIIIa) used in a method disclosed herein is a compound of Formula Formula (VIIIa1):

[chemical structure]

[0908] or a form thereof.

[0909] In one embodiment, the compound of Formula (VIIa) used in a method disclosed herein is a compound of Formula (VIIIa2):

[chemical structure]

[0910] or a form thereof.

[0911] In one embodiment, the compound of Formula (IXa) used in a method disclosed herein is a compound of Formula (IXa1):

[chemical structure]

[0912] or a form thereof.

[0913] In one embodiment, the compound of Formula (IXa) used in a method disclosed herein is a compound of Formula (IXa2):

[chemical structure]

[0914] or a form thereof.

[0915] In one embodiment, the compound of Formula (IXa) used in a method disclosed herein is a compound of Formula (IXa3):

[chemical structure]

[0916] or a form thereof.

[0917] In one embodiment, the compound of Formula (IXa) used in a method disclosed herein is a compound of Formula (IXa4):

[chemical structure]

[0918] or a form thereof.

[0919] In one embodiment, the compound of Formula (Xa) used in a method disclosed herein is a compound of Formula (Xa1):

[chemical structure]

[0920] or a form thereof.

[0921] In one embodiment, the compound of Formula (Xa) used in a method disclosed herein is a compound of Formula (Xa2):

[chemical structure]

[0922] or a form thereof.

[0923] In one embodiment, the compound of Formula (XIa) used in a method disclosed herein is a compound of Formula (XIa1):

[chemical structure]

[0924] or a form thereof.

[0925] In one embodiment, the compound of Formula (XIa) used in a method disclosed herein is a compound of Formula (XIa2):

[chemical structure]

[0926] or a form thereof.

[0927] In one embodiment, the compound of Formula (XIIa) used in a method disclosed herein is a compound of Formula (XIIa1):

[chemical structure]

[0928] or a form thereof.

[0929] In one embodiment, the compound of Formula (XIIa) used in a method disclosed herein is a compound of Formula (XIIa2):

[chemical structure]

[0930] or a form thereof.

[0931] In one embodiment, the compound of Formula (XIIa) used in a method disclosed herein is a compound of Formula (XIIa3):

[chemical structure]

[0932] or a form thereof.

[0933] In one embodiment, the compound of Formula (XIIa) used in a method disclosed herein is a compound of Formula (XIIa4):

[chemical structure]

[0934] or a form thereof.

[0935] In one embodiment, the compound of Formula (XIIIa) used in a method disclosed herein is a compound of Formula (XIIIa1):

[chemical structure]

[0936] or a form thereof.

[0937] In one embodiment, the compound of Formula (XIIIa) used in a method disclosed herein is a compound of Formula (XIIIa2):

[chemical structure]

[0938] or a form thereof.

[0939] In one embodiment, the compound of Formula (XVa) used in a method disclosed herein is a compound of Formula (XIVa1):

[chemical structure]

[0940] or a form thereof.

[0941] In one embodiment, the compound of Formula (XIVa) used in a method disclosed herein is a compound of Formula (XIVa2):

[chemical structure]

[0942] or a form thereof.

[0943] In another embodiment, the compound of Formula (I) used in a method disclosed herein is a compound selected from the group consisting of:

[chemical structure]

[chemical structure]

[chemical structure]

[chemical structure]

[chemical structure]

[chemical structure]

[chemical structure]

[chemical structure]

[chemical structure]

[chemical structure]

[chemical structure]

[chemical structure]

[chemical structure]

[chemical structure]

[chemical structure]

[chemical structure]

[chemical structure]

[chemical structure]

[chemical structure]

[chemical structure]

[chemical structure]

[chemical structure]

[chemical structure]

[chemical structure]

[chemical structure]

[chemical structure]

[chemical structure]

[chemical structure]

[chemical structure]

[chemical structure]

[chemical structure]

[chemical structure]

[chemical structure]

[chemical structure]

[chemical structure]

[chemical structure]

[chemical structure]

[chemical structure]

[chemical structure]

[chemical structure]

[chemical structure]

[chemical structure]

[chemical structure]

[chemical structure]

[chemical structure]

[chemical structure]

[chemical structure]

[chemical structure]

[chemical structure]

[chemical structure]

[chemical structure]

[chemical structure]

[chemical structure]

[chemical structure]

[chemical structure]

[chemical structure]

[chemical structure]

[chemical structure]

[chemical structure]

[chemical structure]

[chemical structure]

[chemical structure]

[chemical structure]

[chemical structure]

[chemical structure]

[chemical structure]

[chemical structure]

[chemical structure]

[chemical structure]

[chemical structure]

[chemical structure]

[chemical structure]

[chemical structure]

[chemical structure]

[chemical structure]

[chemical structure]

[chemical structure]

[chemical structure]

[chemical structure]

[chemical structure]

[chemical structure]

[chemical structure]

[chemical structure]

[chemical structure]

[chemical structure]

[chemical structure]

[chemical structure]

[chemical structure]

[chemical structure]

[chemical structure]

[chemical structure]

[chemical structure]

[chemical structure]

[chemical structure]

[chemical structure]

[chemical structure]

[chemical structure]

[chemical structure]

[chemical structure]

[chemical structure]

[chemical structure]

[chemical structure]

[chemical structure]

[chemical structure]

[chemical structure]

[chemical structure]

[chemical structure]

[chemical structure]

[chemical structure]

[chemical structure]

[chemical structure]

[chemical structure]

[chemical structure]

[chemical structure]

[chemical structure]

[chemical structure]

[chemical structure]

[chemical structure]

[chemical structure]

[chemical structure]

[chemical structure]

[chemical structure]

[chemical structure]

[chemical structure]

[chemical structure]

[chemical structure]

[chemical structure]

[chemical structure]

[chemical structure]

[chemical structure]

[chemical structure]

[chemical structure]

[chemical structure]

[chemical structure]

[chemical structure]

[chemical structure]

[chemical structure]

[chemical structure]

[chemical structure]

[chemical structure]

[chemical structure]

[chemical structure]

[chemical structure]

[chemical structure]

[chemical structure]

[chemical structure]

[chemical structure]

[chemical structure]

[chemical structure]

[chemical structure]

[chemical structure]

[chemical structure]

[chemical structure]

[chemical structure]

[chemical structure]

[chemical structure]

[chemical structure]

[chemical structure]

[0944] or a form thereof.

[0945] In another embodiment, the compound of Formula (I) used in a method disclosed herein is a compound selected from the group consisting of:
[0946] 2-(4-methoxyphenyl)-7-(piperazin-1-yl)-4H-pyrido[1,2-a]pyrimidin-4-one
[0947] 2-(4-methoxyphenyl)-7-(4-methylpiperazin-1-yl)-4H-pyrido[1,2-a]pyrimidin-4-one
[0948] 2-(4-methoxyphenyl)-7-[(3R)-3-methylpiperazin-1-yl]-4H-pyrido[1,2-a]pyrimidin-4-one
[0949] 7-[(3R,5S)-3,5-dimethylpiperazin-1-yl]-2-(4-methoxyphenyl)-4H-pyrido[1,2-a]pyrimidin-4-one
[0950] 7-(1,4-diazepan-1-yl)-2-(4-methoxyphenyl)-4H-pyrido[1,2-a]pyrimidin-4-one
[0951] 2-(3,4-dimethoxyphenyl)-7-(piperazin-1-yl)-4H-pyrido[1,2-a]pyrimidin-4-one
[0952] 2-(3,4-dimethoxyphenyl)-7-(3,3-dimethylpiperazin-1-yl)-4H-pyrido[1,2-a]pyrimidin-4-one
[0953] 2-(3,4-dimethoxyphenyl)-7-[(3R)-3-methylpiperazin-1-yl]-4H-pyrido[1,2-a]pyrimidin-4-one
[0954] 2-(3,4-dimethoxyphenyl)-7-(4-ethylpiperazin-1-yl)-4H-pyrido[1,2-a]pyrimidin-4-one
[0955] 7-(1,4-diazepan-1-yl)-2-(3,4-dimethoxyphenyl)-4H-pyrido[1,2-a]pyrimidin-4-one
[0956] 2-(3,4-dimethoxyphenyl)-7-(4-methyl-1,4-diazepan-1-yl)-4H-pyrido[1,2-a]pyrimidin-4-one
[0957] 2-(4-methoxyphenyl)-7-[(3S)-3-methylpiperazin-1-yl]-4H-pyrido[1,2-a]pyrimidin-4-one
[0958] 2-(3,4-dimethoxyphenyl)-7-(4-methylpiperazin-1-yl)-4H-pyrido[1,2-a]pyrimidin-4-one
[0959] 2-(3,4-dimethoxyphenyl)-7-[(3R,5S)-3,5-dimethylpiperazin-1-yl]-4H-pyrido[1,2-a]pyrimidin-4-one
[0960] 2-(3,4-dimethoxyphenyl)-7-(4-propylpiperazin-1-yl)-4H-pyrido[1,2-a]pyrimidin-4-one
[0961] 2-(4-methoxyphenyl)-7-(4-methyl-1,4-diazepan-1-yl)-4H-pyrido[1,2-a]pyrimidin-4-one
[0962] 7-(3,3-dimethylpiperazin-1-yl)-2-(4-methoxyphenyl)-4H-pyrido[1,2-a]pyrimidin-4-one
[0963] 2-(1,3-benzodioxol-5-yl)-7-(piperazin-1-yl)-4H-pyrido[1,2-a]pyrimidin-4-one
[0964] 2-(1,3-benzodioxol-5-yl)-7-(4-methylpiperazin-1-yl)-4H-pyrido[1,2-a]pyrimidin-4-one
[0965] 2-(1,3-benzodioxol-5-yl)-7-[(3R)-3-methylpiperazin-1-yl]-4H-pyrido[1,2-a]pyrimidin-4-one
[0966] 2-(1,3-benzodioxol-5-yl)-7-[(3R,5S)-3,5-dimethylpiperazin-1-yl]-4H-pyrido[1,2-a]pyrimidin-4-one
[0967] 2-(3-methoxyphenyl)-7-(piperazin-1-yl)-4H-pyrido[1,2-a]pyrimidin-4-one
[0968] 2-(3-methoxyphenyl)-7-(4-methylpiperazin-1-yl)-4H-pyrido[1,2-a]pyrimidin-4-one
[0969] 2-(3-methoxyphenyl)-7-[(3R)-3-methylpiperazin-1-yl]-4H-pyrido[1,2-a]pyrimidin-4-one
[0970] 7-[(3R,5S)-3,5-dimethylpiperazin-1-yl]-2-(3-methoxyphenyl)-4H-pyrido[1,2-a]pyrimidin-4-one
[0971] 7-(4-ethylpiperazin-1-yl)-2-(3-methoxyphenyl)-4H-pyrido[1,2-a]pyrimidin-4-one
[0972] 7-(1,4-diazepan-1-yl)-2-(3-methoxyphenyl)-4H-pyrido[1,2-a]pyrimidin-4-one
[0973] 2-(3-methoxyphenyl)-7-(4-methyl-1,4-diazepan-1-yl)-4H-pyrido[1,2-a]pyrimidin-4-one
[0974] 2-(6-methylimidazo[1,2-a]pyridin-2-yl)-7-(piperazin-1-yl)-4H-pyrido[1,2-a]pyrimidin-4-one
[0975] 2-(3,4-dimethoxyphenyl)-7-[(3S)-3-methylpiperazin-1-yl]-4H-pyrido[1,2-a]pyrimidin-4-one
[0976] 2-(2,3-dihydro-1,4-benzodioxin-6-yl)-7-(piperazin-1-yl)-4H-pyrido[1,2-a]pyrimidin-4-one
[0977] 2-(2,3-dihydro-1,4-benzodioxin-6-yl)-7-[(3S)-3-methylpiperazin-1-yl]-4H-pyrido[1,2-a]pyrimidin-4-one
[0978] 2-phenyl-7-(piperazin-1-yl)-4H-pyrido[1,2-a]pyrimidin-4-one
[0979] 7-[(3S)-3-methylpiperazin-1-yl]-2-phenyl-4H-pyrido[1,2-a]pyrimidin-4-one
[0980] 2-(2,3-dihydro-1,4-benzodioxin-6-yl)-7-[(3R)-3-methylpiperazin-1-yl]-4H-pyrido[1,2-a]pyrimidin-4-one
[0981] 2-(2,3-dihydro-1,4-benzodioxin-6-yl)-7-(3,3-dimethylpiperazin-1-yl)-4H-pyrido[1,2-a]pyrimidin-4-one
[0982] 2-(2,3-dihydro-1,4-benzodioxin-6-yl)-7-[(3R,5S)-3,5-dimethylpiperazin-1-yl]-4H-pyrido[1,2-a]pyrimidin-4-one
[0983] 7-(1,4-diazepan-1-yl)-2-(2,3-dihydro-1,4-benzodioxin-6-yl)-4H-pyrido[1,2-a]pyrimidin-4-one
[0984] 2-(2,3-dihydro-1,4-benzodioxin-6-yl)-7-(4-methyl-1,4-diazepan-1-yl)-4H-pyrido[1,2-a]pyrimidin-4-one
[0985] 2-(3,4-dimethoxyphenyl)-9-fluoro-7-(4-methylpiperazin-1-yl)-4H-pyrido[1,2-a]pyrimidin-4-one
[0986] 2-(3-chlorophenyl)-7-(piperazin-1-yl)-4H-pyrido[1,2-a]pyrimidin-4-one
[0987] 2-(4-chlorophenyl)-7-(piperazin-1-yl)-4H-pyrido[1,2-a]pyrimidin-4-one
[0988] 7-(piperazin-1-yl)-2-[3-(trifluoromethyl)phenyl]-4H-pyrido[1,2-a]pyrimidin-4-one
[0989] 7-(piperazin-1-yl)-2-[4-(trifluoromethyl)phenyl]-4H-pyrido[1,2-a]pyrimidin-4-one
[0990] 2-(3-methylphenyl)-7-(piperazin-1-yl)-4H-pyrido[1,2-a]pyrimidin-4-one
[0991] 2-(4-fluorophenyl)-7-(piperazin-1-yl)-4H-pyrido[1,2-a]pyrimidin-4-one
[0992] 2-(4-nitrophenyl)-7-(piperazin-1-yl)-4H-pyrido[1,2-a]pyrimidin-4-one
[0993] 2-(3,4-dimethoxyphenyl)-9-fluoro-7-(piperidin-4-ylamino)-4H-pyrido[1,2-a]pyrimidin-4-one
[0994] 2-[4-(dimethylamino)phenyl]-9-fluoro-7-(piperazin-1-yl)-4H-pyrido[1,2-a]pyrimidin-4-one
[0995] 2-[4-(dimethylamino)phenyl]-9-fluoro-7-[(3R)-3-methylpiperazin-1-yl]-4H-pyrido[1,2-a]pyrimidin-4-one
[0996] 2-(2-fluorophenyl)-7-(piperazin-1-yl)-4H-pyrido[1,2-a]pyrimidin-4-one
[0997] 3-(3,4-dimethoxyphenyl)-8-(piperazin-1-yl)-4H-pyrido[1,2-a]pyrimidin-4-one
[0998] 2-[4-(dimethylamino)phenyl]-7-(piperazin-1-yl)-4H-pyrido[1,2-a]pyrimidin-4-one
[0999] 2-[4-(dimethylamino)phenyl]-7-[(3S)-3-methylpiperazin-1-yl]-4H-pyrido[1,2-a]pyrimidin-4-one
[1000] 2-(3,4-dimethylphenyl)-7-(piperazin-1-yl)-4H-pyrido[1,2-a]pyrimidin-4-one
[1001] 2-(3,4-dimethylphenyl)-7-[(3S)-3-methylpiperazin-1-yl]-4H-pyrido[1,2-a]pyrimidin-4-one
[1002] 2-[3-(dimethylamino)phenyl]-7-(piperazin-1-yl)-4H-pyrido[1,2-a]pyrimidin-4-one
[1003] 2-[3-(dimethylamino)phenyl]-7-[(3S)-3-methylpiperazin-1-yl]-4H-pyrido[1,2-a]pyrimidin-4-one
[1004] 2-[4-(difluoromethoxy)phenyl]-7-(piperazin-1-yl)-4H-pyrido[1,2-a]pyrimidin-4-one
[1005] 2-[4-(difluoromethoxy)phenyl]-7-[(3S)-3-methylpiperazin-1-yl]-4H-pyrido[1,2-a]pyrimidin-4-one
[1006] 2-(3-fluorophenyl)-7-(piperazin-1-yl)-4H-pyrido[1,2-a]pyrimidin-4-one
[1007] 2-(3-nitrophenyl)-7-(piperazin-1-yl)-4H-pyrido[1,2-a]pyrimidin-4-one
[1008] 2-(4-methylphenyl)-7-(piperazin-1-yl)-4H-pyrido[1,2-a]pyrimidin-4-one
[1009] 2-(2-fluoro-4,5-dimethoxyphenyl)-7-(piperazin-1-yl)-4H-pyrido[1,2-a]pyrimidin-4-one
[1010] 2-(2-fluoro-4,5-dimethoxyphenyl)-7-[(3S)-3-methylpiperazin-1-yl]-4H-pyrido[1,2-a]pyrimidin-4-one
[1011] 7-(3,8-diazabicyclo[3.2.1]oct-3-yl)-2-(3,4-dimethoxyphenyl)-4H-pyrido[1,2-a]pyrimidin-4-one
[1012] 2-[4-methoxy-3-(trifluoromethyl)phenyl]-7-(piperazin-1-yl)-4H-pyrido[1,2-a]pyrimidin-4-one
[1013] 2-[4-methoxy-3-(trifluoromethyl)phenyl]-7-[(3R)-3-methylpiperazin-1-yl]-4H-pyrido[1,2-a]pyrimidin-4-one
[1014] 2-[4-methoxy-3-(trifluoromethyl)phenyl]-7-[(3S)-3-methylpiperazin-1-yl]-4H-pyrido[1,2-a]pyrimidin-4-one
[1015] 2-(3,4-dimethoxyphenyl)-9-methoxy-7-(piperazin-1-yl)-4H-pyrido[1,2-a]pyrimidin-4-one
[1016] 2-(3,5-difluoro-4-hydroxyphenyl)-7-(piperazin-1-yl)-4H-pyrido[1,2-a]pyrimidin-4-one
[1017] 2-(3-fluoro-4-methoxyphenyl)-7-(piperazin-1-yl)-4H-pyrido[1,2-a]pyrimidin-4-one
[1018] 4-[4-oxo-7-(piperazin-1-yl)-4H-pyrido[1,2-a]pyrimidin-2-yl]benzonitrile
[1019] 2-(6-methylimidazo[1,2-a]pyrazin-2-yl)-7-(piperazin-1-yl)-4H-pyrido[1,2-a]pyrimidin-4-one
[1020] 2-(6-methylimidazo[1,2-a]pyrazin-2-yl)-7-[(3S)-3-methylpiperazin-1-yl]-4H-pyrido[1,2-a]pyrimidin-4-one
[1021] 2-[3-fluoro-5-(trifluoromethyl)phenyl]-7-(piperazin-1-yl)-4H-pyrido[1,2-a]pyrimidin-4-one
[1022] 2-[4-fluoro-3-(trifluoromethyl)phenyl]-7-(piperazin-1-yl)-4H-pyrido[1,2-a]pyrimidin-4-one
[1023] 2-[2-methoxy-3-(trifluoromethyl)phenyl]-7-(piperazin-1-yl)-4H-pyrido[1,2-a]pyrimidin-4-one
[1024] 2-(3,5-difluorophenyl)-7-(piperazin-1-yl)-4H-pyrido[1,2-a]pyrimidin-4-one
[1025] 7-(piperazin-1-yl)-2-[3-(trifluoromethoxy)phenyl]-4H-pyrido[1,2-a]pyrimidin-4-one
[1026] 2-[4-methoxy-3-(trifluoromethoxy)phenyl]-7-(piperazin-1-yl)-4H-pyrido[1,2-a]pyrimidin-4-one
[1027] 2-[4-hydroxy-3-(trifluoromethoxy)phenyl]-7-(piperazin-1-yl)-4H-pyrido[1,2-a]pyrimidin-4-one
[1028] 2-[4-methoxy-3-(trifluoromethoxy)phenyl]-7-[(3S)-3-methylpiperazin-1-yl]-4H-pyrido[1,2-a]pyrimidin-4-one
[1029] 2-[4-hydroxy-3-(trifluoromethoxy)phenyl]-7-[(3S)-3-methylpiperazin-1-yl]-4H-pyrido[1,2-a]pyrimidin-4-one
[1030] 2-(3,4-dimethoxyphenyl)-4-oxo-7-(piperazin-1-yl)-4H-quinolizine-1-carbonitrile
[1031] 2-(3-fluoro-4-methoxyphenyl)-7-[(3R)-3-methylpiperazin-1-yl]-4H-pyrido[1,2-a]pyrimidin-4-one
[1032] 2-(3-fluoro-4-methoxyphenyl)-7-[(3S)-3-methylpiperazin-1-yl]-4H-pyrido[1,2-a]pyrimidin-4-one
[1033] 2-(6-methoxypyridin-3-yl)-7-(piperazin-1-yl)-4H-pyrido[1,2-a]pyrimidin-4-one
[1034] 2-(2,4-dimethoxyphenyl)-7-(piperazin-1-yl)-4H-pyrido[1,2-a]pyrimidin-4-one
[1035] 2-(2,4-dimethoxyphenyl)-7-[(3S)-3-methylpiperazin-1-yl]-4H-pyrido[1,2-a]pyrimidin-4-one
[1036] 2-(3,4-dimethoxyphenyl)-7-[(3S)-3-methylpiperazin-1-yl]-4H-quinolizin-4-one
[1037] 2-(5-fluoropyridin-3-yl)-7-(piperazin-1-yl)-4H-pyrido[1,2-a]pyrimidin-4-one
[1038] 2-(5-fluoropyridin-3-yl)-7-[(3S)-3-methylpiperazin-1-yl]-4H-pyrido[1,2-a]pyrimidin-4-one
[1039] 2-(5-chloropyridin-3-yl)-7-(piperazin-1-yl)-4H-pyrido[1,2-a]pyrimidin-4-one
[1040] 2-(5-chloropyridin-3-yl)-7-[(3S)-3-methylpiperazin-1-yl]-4H-pyrido[1,2-a]pyrimidin-4-one
[1041] 2-(5-chloro-6-methoxypyridin-3-yl)-7-(piperazin-1-yl)-4H-pyrido[1,2-a]pyrimidin-4-one
[1042] 2-(1H-indol-6-yl)-7-(piperazin-1-yl)-4H-pyrido[1,2-a]pyrimidin-4-one
[1043] 2-(1H-indol-5-yl)-7-(piperazin-1-yl)-4H-pyrido[1,2-a]pyrimidin-4-one
[1044] 2-[3-(difluoromethoxy)-4-methoxyphenyl]-7-(piperazin-1-yl)-4H-pyrido[1,2-a]pyrimidin-4-one
[1045] 2-[3-(difluoromethoxy)-4-hydroxyphenyl]-7-(piperazin-1-yl)-4H-pyrido[1,2-a]pyrimidin-4-one
[1046] 2-[3-(difluoromethoxy)-4-methoxyphenyl]-7-[(3S)-3-methylpiperazin-1-yl]-4H-pyrido[1,2-a]pyrimidin-4-one
[1047] 2-[3-(difluoromethoxy)-4-hydroxyphenyl]-7-[(3S)-3-methylpiperazin-1-yl]-4H-pyrido[1,2-a]pyrimidin-4-one
[1048] 2-(3-fluoro-4-methoxyphenyl)-7-(piperazin-1-yl)-4H-quinolizin-4-one
[1049] 2-(3-fluoro-4-methoxyphenyl)-7-[(3S)-3-methylpiperazin-1-yl]-4H-quinolizin-4-one
[1050] 2-(3,5-difluorophenyl)-7-[(3S)-3-methylpiperazin-1-yl]-4H-pyrido[1,2-a]pyrimidin-4-one
[1051] 2-(3,4-dimethoxyphenyl)-7-(piperazin-1-yl)-4H-quinolizin-4-one
[1052] 2-(imidazo[1,2-a]pyridin-7-yl)-7-(piperazin-1-yl)-4H-pyrido[1,2-a]pyrimidin-4-one
[1053] 2-(imidazo[1,2-a]pyridin-6-yl)-7-(piperazin-1-yl)-4H-pyrido[1,2-a]pyrimidin-4-one
[1054] 2-(2-methylimidazo[1,2-a]pyridin-6-yl)-7-(piperazin-1-yl)-4H-pyrido[1,2-a]pyrimidin-4-one
[1055] 2-(3-chloro-4-methoxyphenyl)-7-(piperazin-1-yl)-4H-pyrido[1,2-a]pyrimidin-4-one
[1056] 2-(3-chloro-4-methoxyphenyl)-7-[(3S)-3-methylpiperazin-1-yl]-4H-pyrido[1,2-a]pyrimidin-4-one
[1057] 2-(3-ethoxy-4-methoxyphenyl)-7-(piperazin-1-yl)-4H-pyrido[1,2-a]pyrimidin-4-one
[1058] 2-(3-ethoxy-4-methoxyphenyl)-7-[(3S)-3-methylpiperazin-1-yl]-4H-pyrido[1,2-a]pyrimidin-4-one
[1059] 2-(2-methylimidazo[1,2-a]pyridin-6-yl)-7-(4-methylpiperazin-1-yl)-4H-pyrido[1,2-a]pyrimidin-4-one
[1060] 2-(2-methylimidazo[1,2-a]pyridin-6-yl)-7-[(3S)-3-methylpiperazin-1-yl]-4H-pyrido[1,2-a]pyrimidin-4-one
[1061] 7-(1,4-diazepan-1-yl)-2-(2-methylimidazo[1,2-a]pyridin-6-yl)-4H-pyrido[1,2-a]pyrimidin-4-one
[1062] 7-[(3R,5S)-3,5-dimethylpiperazin-1-yl]-2-(2-methylimidazo[1,2-a]pyridin-6-yl)-4H-pyrido[1,2-a]pyrimidin-4-one
[1063] 2-(6,8-dimethylimidazo[1,2-a]pyrazin-2-yl)-7-(piperazin-1-yl)-4H-pyrido[1,2-a]pyrimidin-4-one
[1064] 2-(6,8-dimethylimidazo[1,2-a]pyrazin-2-yl)-7-[(3S)-3-methylpiperazin-1-yl]-4H-pyrido[1,2-a]pyrimidin-4-one
[1065] 2-(4,6-dimethylpyrazolo[1,5-a]pyrazin-2-yl)-7-(piperazin-1-yl)-4H-pyrido[1,2-a]pyrimidin-4-one
[1066] 2-(4,6-dimethylpyrazolo[1,5-a]pyrazin-2-yl)-7-[(3S)-3-methylpiperazin-1-yl]-4H-pyrido[1,2-a]pyrimidin-4-one
[1067] 2-(3,4-dimethoxyphenyl)-7-(2-methylpyridin-4-yl)-4H-pyrido[1,2-a]pyrimidin-4-one
[1068] 7-(piperazin-1-yl)-2-[2-(trifluoromethyl)imidazo[1,2-a]pyridin-6-yl]-4H-pyrido[1,2-a]pyrimidin-4-one
[1069] 2-(2-ethylimidazo[1,2-a]pyridin-6-yl)-7-(piperazin-1-yl)-4H-pyrido[1,2-a]pyrimidin-4-one
[1070] 2-(2,3-dimethylimidazo[1,2-a]pyridin-6-yl)-7-(piperazin-1-yl)-4H-pyrido[1,2-a]pyrimidin-4-one
[1071] 2-(3,4-dimethoxyphenyl)-7-[(3aR,6aS)-hexahydropyrrolo[3,4-c]pyrrol-2(1H)-yl]-4H-pyrido[1,2-a]pyrimidin-4-one
[1072] 7-(4-aminopiperidin-1-yl)-2-(3,4-dimethoxyphenyl)-4H-pyrido[1,2-a]pyrimidin-4-one
[1073] 7-(piperazin-1-yl)-2-(1H-pyrrolo[2,3-b]pyridin-5-yl)-4H-pyrido[1,2-a]pyrimidin-4-one
[1074] 2-(1-methyl-1H-pyrrolo[2,3-b]pyridin-5-yl)-7-(piperazin-1-yl)-4H-pyrido[1,2-a]pyrimidin-4-one
[1075] 7-[(3R,5S)-3,5-dimethylpiperazin-1-yl]-2-(1-methyl-1H-pyrrolo[2,3-b]pyridin-5-yl)-4H-pyrido[1,2-a]pyrimidin-4-one
[1076] 7-[(3R,5S)-3,5-dimethylpiperazin-1-yl]-2-(4,6-dimethylpyrazolo[1,5-a]pyrazin-2-yl)-4H-pyrido[1,2-a]pyrimidin-4-one
[1077] 7-(1,4-diazepan-1-yl)-2-(4,6-dimethylpyrazolo[1,5-a]pyrazin-2-yl)-4H-pyrido[1,2-a]pyrimidin-4-one
[1078] 2-(2-methyl-1,3-benzoxazol-6-yl)-7-(piperazin-1-yl)-4H-pyrido[1,2-a]pyrimidin-4-one
[1079] 2-(2-methyl-1,3-benzoxazol-6-yl)-7-[(3S)-3-methylpiperazin-1-yl]-4H-pyrido[1,2-a]pyrimidin-4-one
[1080] 2-(2-methyl-1,3-benzothiazol-5-yl)-7-[(3S)-3-methylpiperazin-1-yl]-4H-pyrido[1,2-a]pyrimidin-4-one
[1081] 2-(2-methyl-1,3-benzothiazol-5-yl)-7-(piperazin-1-yl)-4H-pyrido[1,2-a]pyrimidin-4-one
[1082] 2-(2-methyl-2H-indazol-5-yl)-7-(piperazin-1-yl)-4H-pyrido[1,2-a]pyrimidin-4-one
[1083] 2-(2-methyl-2H-indazol-5-yl)-7-[(3S)-3-methylpiperazin-1-yl]-4H-pyrido[1,2-a]pyrimidin-4-one
[1084] 2-(3-fluoro-5-methoxyphenyl)-7-(piperazin-1-yl)-4H-pyrido[1,2-a]pyrimidin-4-one
[1085] 2-(3-fluoro-5-methoxyphenyl)-7-[(3S)-3-methylpiperazin-1-yl]-4H-pyrido[1,2-a]pyrimidin-4-one
[1086] 2-(2,8-dimethylimidazo[1,2-a]pyridin-6-yl)-7-(piperazin-1-yl)-4H-pyrido[1,2-a]pyrimidin-4-one
[1087] 2-(3,4-dimethoxyphenyl)-9-methyl-7-[(3S)-3-methylpiperazin-1-yl]-4H-pyrido[1,2-a]pyrimidin-4-one
[1088] 2-(3,4-dimethoxyphenyl)-7-(1,2,3,6-tetrahydropyridin-4-yl)-4H-pyrido[1,2-a]pyrimidin-4-one
[1089] 2-(3,4-dimethoxyphenyl)-7-(piperidin-4-yl)-4H-pyrido[1,2-a]pyrimidin-4-one
[1090] 2-(3-fluoro-4,5-dimethoxyphenyl)-7-(piperazin-1-yl)-4H-pyrido[1,2-a]pyrimidin-4-one
[1091] 2-(3,4-dimethoxyphenyl)-7-(4-hydroxypiperazin-1-yl)-4H-pyrido[1,2-a]pyrimidin-4-one
[1092] 2-(3,4-dimethoxyphenyl)-7-[(3S)-3-(dimethylamino)pyrrolidin-1-yl]-4H-pyrido[1,2-a]pyrimidin-4-one
[1093] 2-(3,4-dimethoxyphenyl)-7-[4-(dimethylamino)piperidin-1-yl]-4H-pyrido[1,2-a]pyrimidin-4-one
[1094] 2-(4-methoxy-3-methylphenyl)-7-(piperazin-1-yl)-4H-pyrido[1,2-a]pyrimidin-4-one
[1095] 3-[4-oxo-7-(piperazin-1-yl)-4H-pyrido[1,2-a]pyrimidin-2-yl]benzonitrile
[1096] 2-methoxy-5-[4-oxo-7-(piperazin-1-yl)-4H-pyrido[1,2-a]pyrimidin-2-yl]benzonitrile
[1097] 2-(3-fluoro-4-hydroxyphenyl)-7-(piperazin-1-yl)-4H-pyrido[1,2-a]pyrimidin-4-one
[1098] 2-(4-ethoxy-3-fluorophenyl)-7-(piperazin-1-yl)-4H-pyrido[1,2-a]pyrimidin-4-one
[1099] 2-[3-fluoro-4-(2,2,2-trifluoroethoxy)phenyl]-7-(piperazin-1-yl)-4H-pyrido[1,2-a]pyrimidin-4-one
[1100] 2-(2-methyl-1,3-benzoxazol-5-yl)-7-(piperazin-1-yl)-4H-pyrido[1,2-a]pyrimidin-4-one
[1101] 2-(2-methyl-1,3-benzoxazol-5-yl)-7-[(3S)-3-methylpiperazin-1-yl]-4H-pyrido[1,2-a]pyrimidin-4-one
[1102] 2-(3-fluoro-4-methylphenyl)-7-(piperazin-1-yl)-4H-pyrido[1,2-a]pyrimidin-4-one
[1103] 2-(3-fluoro-4-methylphenyl)-7-[(3S)-3-methylpiperazin-1-yl]-4H-pyrido[1,2-a]pyrimidin-4-one
[1104] 7-[(3S)-3-aminopyrrolidin-1-yl]-2-(3,4-dimethoxyphenyl)-4H-pyrido[1,2-a]pyrimidin-4-one
[1105] 2-(3,4-dimethoxyphenyl)-9-methyl-7-(piperazin-1-yl)-4H-pyrido[1,2-a]pyrimidin-4-one
[1106] 7-(1,4-diazepan-1-yl)-2-(2-methyl-1,3-benzothiazol-5-yl)-4H-pyrido[1,2-a]pyrimidin-4-one
[1107] 7-[(3S)-3-methylpiperazin-1-yl]-2-(4-methyl-1,3-thiazol-2-yl)-4H-pyrido[1,2-a]pyrimidin-4-one
[1108] 2-(4-methyl-1,3-thiazol-2-yl)-7-(piperazin-1-yl)-4H-pyrido[1,2-a]pyrimidin-4-one
[1109] 2-(3,4-dimethoxyphenyl)-7-(1-methylpiperidin-4-yl)-4H-pyrido[1,2-a]pyrimidin-4-one
[1110] 2-(3,4-dimethoxyphenyl)-7-[(3S)-3-(propan-2-ylamino)pyrrolidin-1-yl]-4H-pyrido[1,2-a]pyrimidin-4-one
[1111] 2-(3-fluoro-4-methoxyphenyl)-7-(4-methyl-1,4-diazepan-1-yl)-4H-pyrido[1,2-a]pyrimidin-4-one
[1112] 2-(4-methoxy-3-nitrophenyl)-7-(piperazin-1-yl)-4H-pyrido[1,2-a]pyrimidin-4-one
[1113] 2-[3-fluoro-4-(methylsulfanyl)phenyl]-7-(piperazin-1-yl)-4H-pyrido[1,2-a]pyrimidin-4-one
[1114] 7-(4-methyl-1,4-diazepan-1-yl)-2-(2-methylimidazo[1,2-a]pyridin-6-yl)-4H-pyrido[1,2-a]pyrimidin-4-one
[1115] 2-(4,6-dimethylpyrazolo[1,5-a]pyrazin-2-yl)-7-(4-methylpiperazin-1-yl)-4H-pyrido[1,2-a]pyrimidin-4-one
[1116] 2-(2-methyl-1,3-benzoxazol-6-yl)-7-(4-methylpiperazin-1-yl)-4H-pyrido[1,2-a]pyrimidin-4-one
[1117] 7-[(3R,5S)-3,5-dimethylpiperazin-1-yl]-2-(2-methyl-1,3-benzoxazol-6-yl)-4H-pyrido[1,2-a]pyrimidin-4-one
[1118] 2-(5-fluoro-6-methoxypyridin-3-yl)-7-[(3S)-3-methylpiperazin-1-yl]-4H-pyrido[1,2-a]pyrimidin-4-one
[1119] 7-[(3R,5S)-3,5-dimethylpiperazin-1-yl]-2-(5-fluoro-6-methoxypyridin-3-yl)-4H-pyrido[1,2-a]pyrimidin-4-one
[1120] 7-[(3R,5S)-3,5-dimethylpiperazin-1-yl]-2-(2-methyl-1,3-benzothiazol-5-yl)-4H-pyrido[1,2-a]pyrimidin-4-one
[1121] 2-(2-methyl-1,3-benzothiazol-5-yl)-7-(4-methylpiperazin-1-yl)-4H-pyrido[1,2-a]pyrimidin-4-one
[1122] 2-(2-methyl-1,3-benzothiazol-5-yl)-7-(4-methyl-1,4-diazepan-1-yl)-4H-pyrido[1,2-a]pyrimidin-4-one
[1123] 7-[(8aS)-hexahydropyrrolo[1,2-a]pyrazin-2(1H)-yl]-2-(2-methyl-1,3-benzothiazol-5-yl)-4H-pyrido[1,2-a]pyrimidin-4-one
[1124] 2-(4-methyl-1H-imidazol-1-yl)-7-(piperazin-1-yl)-4H-pyrido[1,2-a]pyrimidin-4-one
[1125] 2-(4-methyl-1H-imidazol-1-yl)-7-[(3S)-3-methylpiperazin-1-yl]-4H-pyrido[1,2-a]pyrimidin-4-one
[1126] 2-(3,4-dimethoxyphenyl)-7-{[2-(methylamino)ethyl]amino}-4H-pyrido[1,2-a]pyrimidin-4-one
[1127] 2-(5-fluoro-6-methoxypyridin-3-yl)-7-(piperazin-1-yl)-4H-pyrido[1,2-a]pyrimidin-4-one
[1128] 2-(3,5-difluoro-4-methoxyphenyl)-7-(piperazin-1-yl)-4H-pyrido[1,2-a]pyrimidin-4-one
[1129] 2-(3,5-difluoro-4-methoxyphenyl)-7-[(3S)-3-methylpiperazin-1-yl]-4H-pyrido[1,2-a]pyrimidin-4-one
[1130] 7-[4-(dimethylamino)piperidin-1-yl]-2-(3-fluoro-4-methoxyphenyl)-4H-pyrido[1,2-a]pyrimidin-4-one
[1131] 2-(3-fluoro-4-methoxyphenyl)-7-(1,2,3,6-tetrahydropyridin-4-yl)-4H-pyrido[1,2-a]pyrimidin-4-one
[1132] 2-(3,4-dimethoxyphenyl)-7-(piperidin-4-ylamino)-4H-pyrido[1,2-a]pyrimidin-4-one
[1133] 2-(3,4-dimethoxyphenyl)-7-(1-methyl-1,2,3,6-tetrahydropyridin-4-yl)-4H-pyrido[1,2-a]pyrimidin-4-one
[1134] 2-(3-chloro-5-fluorophenyl)-7-[(3S)-3-methylpiperazin-1-yl]-4H-pyrido[1,2-a]pyrimidin-4-one
[1135] 2-(3-chloro-5-fluorophenyl)-7-(piperazin-1-yl)-4H-pyrido[1,2-a]pyrimidin-4-one
[1136] 7-[(3S)-3-methylpiperazin-1-yl]-2-(1-methyl-1H-pyrazol-4-yl)-4H-pyrido[1,2-a]pyrimidin-4-one
[1137] 2-(1-methyl-1H-pyrazol-4-yl)-7-(piperazin-1-yl)-4H-pyrido[1,2-a]pyrimidin-4-one
[1138] 2-(2-methyl-1,3-benzoxazol-6-yl)-7-[(3R)-3-methylpiperazin-1-yl]-4H-pyrido[1,2-a]pyrimidin-4-one
[1139] 7-(3,3-dimethylpiperazin-1-yl)-2-(2-methyl-1,3-benzoxazol-6-yl)-4H-pyrido[1,2-a]pyrimidin-4-one
[1140] 7-(1,4-diazepan-1-yl)-2-(2-methyl-1,3-benzoxazol-6-yl)-4H-pyrido[1,2-a]pyrimidin-4-one
[1141] 2-(2-methyl-1,3-benzoxazol-6-yl)-7-(4-methyl-1,4-diazepan-1-yl)-4H-pyrido[1,2-a]pyrimidin-4-one
[1142] 7-[(8aS)-hexahydropyrrolo[1,2-a]pyrazin-2(1H)-yl]-2-(2-methyl-1,3-benzoxazol-6-yl)-4H-pyrido[1,2-a]pyrimidin-4-one
[1143] 7-[(8aR)-hexahydropyrrolo[1,2-a]pyrazin-2(1H)-yl]-2-(2-methyl-1,3-benzoxazol-6-yl)-4H-pyrido[1,2-a]pyrimidin-4-one
[1144] 2-(4,5-dimethoxypyridin-2-yl)-7-(piperazin-1-yl)-4H-pyrido[1,2-a]pyrimidin-4-one
[1145] 7-[3-(dimethylamino)pyrrolidin-1-yl]-2-(3-fluoro-4-methoxyphenyl)-4H-quinolizin-4-one
[1146] 7-(4-aminopiperidin-1-yl)-2-(3-fluoro-4-methoxyphenyl)-4H-quinolizin-4-one
[1147] 7-(4-ethylpiperazin-1-yl)-2-(2-methyl-1,3-benzoxazol-6-yl)-4H-pyrido[1,2-a]pyrimidin-4-one
[1148] 7-[4-(dimethylamino)piperidin-1-yl]-2-(3-fluoro-4-methoxyphenyl)-4H-quinolizin-4-one
[1149] 2-(3-fluoro-4-methoxyphenyl)-7-(1-methyl-1,2,3,6-tetrahydropyridin-4-yl)-4H-pyrido[1,2-a]pyrimidin-4-one
[1150] 7-[(3S)-3-(dimethylamino)pyrrolidin-1-yl]-2-(3-fluoro-4-methoxyphenyl)-4H-pyrido[1,2-a]pyrimidin-4-one
[1151] 7-[(3R,4R)-3-(dimethylamino)-4-hydroxypyrrolidin-1-yl]-2-(3-fluoro-4-methoxyphenyl)-4H-pyrido[1,2-a]pyrimidin-4-one
[1152] 7-(4-aminopiperidin-1-yl)-2-(3-fluoro-4-methoxyphenyl)-4H-pyrido[1,2-a]pyrimidin-4-one
[1153] 2-(3-fluoro-4-methoxyphenyl)-7-[4-(methylamino)piperidin-1-yl]-4H-pyrido[1,2-a]pyrimidin-4-one
[1154] 2-(8-fluoro-2-methylimidazo[1,2-a]pyridin-6-yl)-7-(piperazin-1-yl)-4H-pyrido[1,2-a]pyrimidin-4-one
[1155] 7-[(3R,5S)-3,5-dimethylpiperazin-1-yl]-2-(8-fluoro-2-methylimidazo[1,2-a]pyridin-6-yl)-4H-pyrido[1,2-a]pyrimidin-4-one
[1156] 2-(8-fluoro-2-methylimidazo[1,2-a]pyridin-6-yl)-7-(4-methyl-1,4-diazepan-1-yl)-4H-pyrido[1,2-a]pyrimidin-4-one
[1157] 2-(3-fluoro-4-methoxyphenyl)-7-[(3aR,6aS)-hexahydropyrrolo[3,4-c]pyrrol-2(1H)-yl]-4H-pyrido[1,2-a]pyrimidin-4-one
[1158] 2-(3-fluoro-4-methoxyphenyl)-7-[(3aR,6aS)-5-methylhexahydropyrrolo[3,4-c]pyrrol-2(1H)-yl]-4H-pyrido[1,2-a]pyrimidin-4-one
[1159] 2-(3,4-dimethoxyphenyl)-7-[1-(2-hydroxyethyl)piperidin-4-yl]-4H-pyrido[1,2-a]pyrimidin-4-one
[1160] 2-(4-fluoro-3-methoxyphenyl)-7-[(3S)-3-methylpiperazin-1-yl]-4H-pyrido[1,2-a]pyrimidin-4-one
[1161] 2-(4-fluoro-3-methoxyphenyl)-7-(piperazin-1-yl)-4H-pyrido[1,2-a]pyrimidin-4-one
[1162] 2-(3,4-difluoro-5-methoxyphenyl)-7-[(3S)-3-methylpiperazin-1-yl]-4H-pyrido[1,2-a]pyrimidin-4-one
[1163] 2-(3,4-difluoro-5-methoxyphenyl)-7-(piperazin-1-yl)-4H-pyrido[1,2-a]pyrimidin-4-one
[1164] 2-(2-methyl-1,3-benzothiazol-6-yl)-7-(piperazin-1-yl)-4H-pyrido[1,2-a]pyrimidin-4-one
[1165] 7-(3-fluoro-4-methoxyphenyl)-2-(piperazin-1-yl)-4H-pyrido[1,2-a]pyrimidin-4-one
[1166] 2-(2-methyl-1,3-benzothiazol-6-yl)-7-[(3S)-3-methylpiperazin-1-yl]-4H-pyrido[1,2-a]pyrimidin-4-one
[1167] 2-(3-fluoro-4-methoxyphenyl)-7-[(3S)-3-(methylamino)pyrrolidin-1-yl]-4H-pyrido[1,2-a]pyrimidin-4-one
[1168] 2-(3-fluoro-4-methoxyphenyl)-7-{4-[(methylamino)methyl]piperidin-1-yl}-4H-pyrido[1,2-a]pyrimidin-4-one
[1169] 7-[(3S)-3-aminopyrrolidin-1-yl]-2-(3-fluoro-4-methoxyphenyl)-4H-pyrido[1,2-a]pyrimidin-4-one
[1170] 2-(3-fluoro-4-methoxyphenyl)-7-{[(3R)-1-methylpyrrolidin-3-yl]amino}-4H-pyrido[1,2-a]pyrimidin-4-one
[1171] 7-{4-[(dimethylamino)methyl]piperidin-1-yl}-2-(3-fluoro-4-methoxyphenyl)-4H-pyrido[1,2-a]pyrimidin-4-one
[1172] 2-(6-methoxypyridin-2-yl)-7-(piperazin-1-yl)-4H-pyrido[1,2-a]pyrimidin-4-one
[1173] 7-(piperazin-1-yl)-2-(pyridin-3-yl)-4H-pyrido[1,2-a]pyrimidin-4-one
[1174] 2-(5-methoxypyridin-3-yl)-7-(piperazin-1-yl)-4H-pyrido[1,2-a]pyrimidin-4-one
[1175] 3-fluoro-5-{7-[(3S)-3-methylpiperazin-1-yl]-4-oxo-4H-pyrido[1,2-a]pyrimidin-2-yl}benzonitrile
[1176] 3-fluoro-5-[4-oxo-7-(piperazin-1-yl)-4H-pyrido[1,2-a]pyrimidin-2-yl]benzonitrile
[1177] 2-(3-fluoro-4-methoxyphenyl)-7-[(3′S,4′S)-4′-hydroxy-1,3′-bipyrrolidin-1′-yl]-4H-pyrido[1,2-a]pyrimidin-4-one
[1178] 2-(3-fluoro-4-methoxyphenyl)-7-{methyl[(3R)-pyrrolidin-3-yl]amino}-4H-pyrido[1,2-a]pyrimidin-4-one
[1179] 7-[(3S)-3,4-dimethylpiperazin-1-yl]-2-(2-methyl-1,3-benzoxazol-6-yl)-4H-pyrido[1,2-a]pyrimidin-4-one
[1180] 2-(3,4-dimethoxyphenyl)-7-[(1-methylpiperidin-4-yl)oxy]-4H-pyrido[1,2-a]pyrimidin-4-one
[1181] 2-(3,4-dimethoxyphenyl)-7-[(3S)-pyrrolidin-3-yloxy]-4H-pyrido[1,2-a]pyrimidin-4-one
[1182] 2-(3,4-dimethoxyphenyl)-7-(piperidin-4-yloxy)-4H-pyrido[1,2-a]pyrimidin-4-one
[1183] 7-(1,4-diazepan-1-yl)-2-(3,4-dimethoxyphenyl)-9-methyl-4H-pyrido[1,2-a]pyrimidin-4-one
[1184] 2-(3-fluoro-4-methoxyphenyl)-7-{methyl[(3R)-1-methylpyrrolidin-3-yl]amino}-4H-pyrido[1,2-a]pyrimidin-4-one
[1185] 7-[4-(dimethylamino)piperidin-1-yl]-2-(2-methyl-1,3-benzoxazol-6-yl)-4H-pyrido[1,2-a]pyrimidin-4-one
[1186] 7-[(3S)-3-(dimethylamino)pyrrolidin-1-yl]-2-(2-methyl-1,3-benzoxazol-6-yl)-4H-pyrido[1,2-a]pyrimidin-4-one
[1187] 7-(4-aminopiperidin-1-yl)-2-(2-methyl-1,3-benzoxazol-6-yl)-4H-pyrido[1,2-a]pyrimidin-4-one
[1188] 7-[(3aR,6aS)-hexahydropyrrolo[3,4-c]pyrrol-2(1H)-yl]-2-(2-methyl-1,3-benzoxazol-6-yl)-4H-pyrido[1,2-a]pyrimidin-4-one
[1189] 7-[(3R)-3,4-dimethylpiperazin-1-yl]-2-(2-methyl-1,3-benzoxazol-6-yl)-4H-pyrido[1,2-a]pyrimidin-4-one
[1190] 2-(3,4-dimethoxyphenyl)-7-(1,2,3,6-tetrahydropyridin-4-yl)-4H-quinolizin-4-one
[1191] 2-(3-fluoro-4-methoxyphenyl)-7-[(3aR,6aR)-1-methylhexahydropyrrolo[3,4-b]pyrrol-5(1H)-yl]-4H-pyrido[1,2-a]pyrimidin-4-one
[1192] 2-(3,4-dimethoxyphenyl)-9-methyl-7-(1,2,3,6-tetrahydropyridin-4-yl)-4H-pyrido[1,2-a]pyrimidin-4-one
[1193] 2-(3,4-dimethoxyphenyl)-7-[1-(2-hydroxyethyl)-1,2,3,6-tetrahydropyridin-4-yl]-4H-pyrido[1,2-a]pyrimidin-4-one
[1194] 2-(3,4-dimethoxyphenyl)-7-(1-methyl-1,2,3,6-tetrahydropyridin-4-yl)-4H-quinolizin-4-one
[1195] 2-(3,4-dimethoxyphenyl)-9-methyl-7-(piperidin-4-yl)-4H-pyrido[1,2-a]pyrimidin-4-one
[1196] 2-(3,4-dimethoxyphenyl)-9-methyl-7-(1-methyl-1,2,3,6-tetrahydropyridin-4-yl)-4H-pyrido[1,2-a]pyrimidin-4-one
[1197] 2-(3,4-dimethoxyphenyl)-9-methyl-7-(1-methylpiperidin-4-yl)-4H-pyrido[1,2-a]pyrimidin-4-one
[1198] 7-(1,4-diazepan-1-yl)-2-(2-methyl-1,3-benzothiazol-6-yl)-4H-pyrido[1,2-a]pyrimidin-4-one
[1199] 2-(2-methyl-1,3-benzothiazol-6-yl)-7-(4-methyl-1,4-diazepan-1-yl)-4H-pyrido[1,2-a]pyrimidin-4-one
[1200] 7-[(8aS)-hexahydropyrrolo[1,2-a]pyrazin-2(1H)-yl]-2-(2-methyl-1,3-benzothiazol-6-yl)-4H-pyrido[1,2-a]pyrimidin-4-one
[1201] 2-(2-methyl-1,3-benzothiazol-6-yl)-7-(4-methylpiperazin-1-yl)-4H-pyrido[1,2-a]pyrimidin-4-one
[1202] 2-(3,4-dimethoxyphenyl)-7-[(3aR,6aS)-hexahydropyrrolo[3,4-c]pyrrol-2(1H)-yl]-9-methyl-4H-pyrido[1,2-a]pyrimidin-4-one
[1203] 7-[(3S)-3,4-dimethylpiperazin-1-yl]-2-(4,6-dimethylpyrazolo[1,5-a]pyrazin-2-yl)-4H-pyrido[1,2-a]pyrimidin-4-one
[1204] 2-(4,6-dimethylpyrazolo[1,5-a]pyrazin-2-yl)-7-[(3R,5S)-3,4,5-trimethylpiperazin-1-yl]-4H-pyrido[1,2-a]pyrimidin-4-one
[1205] 2-(3,4-dimethoxyphenyl)-9-methyl-7-[(3aR,6aS)-5-methylhexahydropyrrolo[3,4-c]pyrrol-2(1H)-yl]-4H-pyrido[1,2-a]pyrimidin-4-one
[1206] 2-(3,4-dimethoxyphenyl)-7-[4-(dimethylamino)piperidin-1-yl]-9-methyl-4H-pyrido[1,2-a]pyrimidin-4-one
[1207] 7-[(1R,5S)-8-azabicyclo[3.2.1]oct-2-en-3-yl]-2-(3,4-dimethoxyphenyl)-4H-pyrido[1,2-a]pyrimidin-4-one
[1208] 2-(3,4-dimethoxyphenyl)-7-(1,2,5,6-tetrahydropyridin-3-yl)-4H-pyrido[1,2-a]pyrimidin-4-one
[1209] 7-[(3R)-3-(dimethylamino)pyrrolidin-1-yl]-2-(2-methyl-1,3-benzoxazol-6-yl)-4H-pyrido[1,2-a]pyrimidin-4-one
[1210] 2-(2-ethyl-1,3-benzoxazol-6-yl)-7-(piperazin-1-yl)-4H-pyrido[1,2-a]pyrimidin-4-one
[1211] 2-(2-ethyl-1,3-benzoxazol-6-yl)-7-[(3S)-3-methylpiperazin-1-yl]-4H-pyrido[1,2-a]pyrimidin-4-one
[1212] 2-(2-methyl-1,3-benzoxazol-6-yl)-7-[(3aR,6aS)-5-methylhexahydropyrrolo[3,4-c]pyrrol-2(1H)-yl]-4H-pyrido[1,2-a]pyrimidin-4-one
[1213] 7-(8-fluoro-2-methylimidazo[1,2-a]pyridin-6-yl)-2-(piperazin-1-yl)-4H-pyrido[1,2-a]pyrimidin-4-one
[1214] 2-(8-fluoro-2-methylimidazo[1,2-a]pyridin-6-yl)-7-(4-methylpiperazin-1-yl)-4H-pyrido[1,2-a]pyrimidin-4-one
[1215] 2-(8-fluoro-2-methylimidazo[1,2-a]pyridin-6-yl)-7-[(3R)-3-methylpiperazin-1-yl]-4H-pyrido[1,2-a]pyrimidin-4-one
[1216] 2-(8-fluoro-2-methylimidazo[1,2-a]pyridin-6-yl)-7-[(8aS)-hexahydropyrrolo[1,2-a]pyrazin-2(1H)-yl]-4H-pyrido[1,2-a]pyrimidin-4-one
[1217] 2-(8-fluoro-2-methylimidazo[1,2-a]pyridin-6-yl)-7-[(8aR)-hexahydropyrrolo[1,2-a]pyrazin-2(1H)-yl]-4H-pyrido[1,2-a]pyrimidin-4-one
[1218] 7-(4-aminopiperidin-1-yl)-2-(8-fluoro-2-methylimidazo[1,2-a]pyridin-6-yl)-4H-pyrido[1,2-a]pyrimidin-4-one
[1219] 7-[(3R)-3-(dimethylamino)pyrrolidin-1-yl]-2-(8-fluoro-2-methylimidazo[1,2-a]pyridin-6-yl)-4H-pyrido[1,2-a]pyrimidin-4-one
[1220] 7-[(3S)-3-(dimethylamino)pyrrolidin-1-yl]-2-(8-fluoro-2-methylimidazo[1,2-a]pyridin-6-yl)-4H-pyrido[1,2-a]pyrimidin-4-one
[1221] 2-(4-aminopiperidin-1-yl)-7-(3-fluoro-4-methoxyphenyl)-4H-pyrido[1,2-a]pyrimidin-4-one
[1222] 2-[(3R)-3-(dimethylamino)pyrrolidin-1-yl]-7-(3-fluoro-4-methoxyphenyl)-4H-pyrido[1,2-a]pyrimidin-4-one
[1223] 2-[(3S)-3-(dimethylamino)pyrrolidin-1-yl]-7-(3-fluoro-4-methoxyphenyl)-4H-pyrido[1,2-a]pyrimidin-4-one
[1224] 2-(3-fluoro-4-methoxyphenyl)-7-[(3aR,6aS)-5-(2-hydroxyethyl)hexahydropyrrolo[3,4-c]pyrrol-2(1H)-yl]-4H-pyrido[1,2-a]pyrimidin-4-one
[1225] 2-(3-fluoro-4-methoxyphenyl)-7-[(3aS,6aS)-1-methylhexahydropyrrolo[3,4-b]pyrrol-5(1H)-yl]-4H-pyrido[1,2-a]pyrimidin-4-one
[1226] 2-(3-fluoro-4-methoxyphenyl)-7-[(3aR,6aS)-5-(propan-2-yl)hexahydropyrrolo[3,4-c]pyrrol-2(1H)-yl]-4H-pyrido[1,2-a]pyrimidin-4-one
[1227] 7-[(3R)-3-(dimethylamino)pyrrolidin-1-yl]-2-(3-fluoro-4-methoxyphenyl)-4H-pyrido[1,2-a]pyrimidin-4-one
[1228] 7-(3,3-dimethylpiperazin-1-yl)-2-(2-methyl-1,3-benzothiazol-6-yl)-4H-pyrido[1,2-a]pyrimidin-4-one
[1229] 7-[(8aR)-hexahydropyrrolo[1,2-a]pyrazin-2(1H)-yl]-2-(2-methyl-1,3-benzothiazol-6-yl)-4H-pyrido[1,2-a]pyrimidin-4-one
[1230] 7-[4-(dimethylamino)piperidin-1-yl]-2-(2-methyl-1,3-benzothiazol-6-yl)-4H-pyrido[1,2-a]pyrimidin-4-one
[1231] 2-(2-methyl-1,3-benzothiazol-6-yl)-7-(piperidin-4-yloxy)-4H-pyrido[1,2-a]pyrimidin-4-one
[1232] 2-(8-chloro-2-methylimidazo[1,2-a]pyridin-6-yl)-7-(piperazin-1-yl)-4H-pyrido[1,2-a]pyrimidin-4-one
[1233] 2-(8-chloro-2-methylimidazo[1,2-a]pyridin-6-yl)-7-[(3R,5S)-3,5-dimethylpiperazin-1-yl]-4H-pyrido[1,2-a]pyrimidin-4-one
[1234] 2-(8-chloro-2-methylimidazo[1,2-a]pyridin-6-yl)-7-(4-methyl-1,4-diazepan-1-yl)-4H-pyrido[1,2-a]pyrimidin-4-one
[1235] 2-(8-chloro-2-methylimidazo[1,2-a]pyridin-6-yl)-7-[(3R)-3-methylpiperazin-1-yl]-4H-pyrido[1,2-a]pyrimidin-4-one
[1236] 2-(8-chloro-2-methylimidazo[1,2-a]pyridin-6-yl)-7-[(3S)-3-methylpiperazin-1-yl]-4H-pyrido[1,2-a]pyrimidin-4-one
[1237] 2-(8-chloro-2-methylimidazo[1,2-a]pyridin-6-yl)-7-[(8aR)-hexahydropyrrolo[1,2-a]pyrazin-2(1H)-yl]-4H-pyrido[1,2-a]pyrimidin-4-one
[1238] 2-(8-chloro-2-methylimidazo[1,2-a]pyridin-6-yl)-7-[(8aS)-hexahydropyrrolo[1,2-a]pyrazin-2(1H)-yl]-4H-pyrido[1,2-a]pyrimidin-4-one
[1239] 7-(3-fluoro-4-methoxyphenyl)-2-(1,2,3,6-tetrahydropyridin-4-yl)-4H-pyrido[1,2-a]pyrimidin-4-one
[1240] 7-[(3S)-3,4-dimethylpiperazin-1-yl]-2-(8-fluoro-2-methylimidazo[1,2-a]pyridin-6-yl)-4H-pyrido[1,2-a]pyrimidin-4-one
[1241] 7-[(3R)-3,4-dimethylpiperazin-1-yl]-2-(8-fluoro-2-methylimidazo[1,2-a]pyridin-6-yl)-4H-pyrido[1,2-a]pyrimidin-4-one
[1242] 7-[4-(dimethylamino)piperidin-1-yl]-2-(8-fluoro-2-methylimidazo[1,2-a]pyridin-6-yl)-4H-pyrido[1,2-a]pyrimidin-4-one
[1243] 2-[4-(dimethylamino)piperidin-1-yl]-7-(3-fluoro-4-methoxyphenyl)-4H-pyrido[1,2-a]pyrimidin-4-one
[1244] 2-(4-fluoro-2-methyl-1,3-benzoxazol-6-yl)-7-(1,2,3,6-tetrahydropyridin-4-yl)-4H-pyrido[1,2-a]pyrimidin-4-one
[1245] 2-(4-fluoro-2-methyl-1,3-benzoxazol-6-yl)-7-(1-methyl-1,2,3,6-tetrahydropyridin-4-yl)-4H-pyrido[1,2-a]pyrimidin-4-one
[1246] 2-(3-fluoro-4-methoxyphenyl)-7-[(4aR,7aR)-octahydro-6H-pyrrolo[3,4-b]pyridin-6-yl]-4H-pyrido[1,2-a]pyrimidin-4-one
[1247] 2-(2-methyl-1,3-benzoxazol-6-yl)-7-(1,2,3,6-tetrahydropyridin-4-yl)-4H-pyrido[1,2-a]pyrimidin-4-one
[1248] 2-(2-methyl-1,3-benzoxazol-6-yl)-7-(1-methyl-1,2,3,6-tetrahydropyridin-4-yl)-4H-pyrido[1,2-a]pyrimidin-4-one
[1249] 7-(1-ethyl-1,2,3,6-tetrahydropyridin-4-yl)-2-(2-methyl-1,3-benzoxazol-6-yl)-4H-pyrido[1,2-a]pyrimidin-4-one
[1250] 2-(4-fluoro-2-methyl-1,3-benzoxazol-6-yl)-7-(piperazin-1-yl)-4H-pyrido[1,2-a]pyrimidin-4-one
[1251] 2-(4-fluoro-2-methyl-1,3-benzoxazol-6-yl)-7-[(3S)-3-methylpiperazin-1-yl]-4H-pyrido[1,2-a]pyrimidin-4-one
[1252] 7-[(3S)-3,4-dimethylpiperazin-1-yl]-2-(4-fluoro-2-methyl-1,3-benzoxazol-6-yl)-4H-pyrido[1,2-a]pyrimidin-4-one
[1253] 2-(4-fluoro-2-methyl-1,3-benzoxazol-6-yl)-7-(4-methylpiperazin-1-yl)-4H-pyrido[1,2-a]pyrimidin-4-one
[1254] 7-(4-ethylpiperazin-1-yl)-2-(4-fluoro-2-methyl-1,3-benzoxazol-6-yl)-4H-pyrido[1,2-a]pyrimidin-4-one
[1255] 2-(4-fluoro-2-methyl-1,3-benzoxazol-6-yl)-7-(4-propylpiperazin-1-yl)-4H-pyrido[1,2-a]pyrimidin-4-one
[1256] 7-[(3aR,6aS)-5-ethylhexahydropyrrolo[3,4-c]pyrrol-2(1H)-yl]-2-(3-fluoro-4-methoxyphenyl)-4H-pyrido[1,2-a]pyrimidin-4-one
[1257] 2-(3-fluoro-4-methoxyphenyl)-9-methyl-7-(1,2,3,6-tetrahydropyridin-4-yl)-4H-pyrido[1,2-a]pyrimidin-4-one
[1258] 2-(3-fluoro-4-methoxyphenyl)-7-[(4aR,7aR)-1-methyloctahydro-6H-pyrrolo[3,4-b]pyridin-6-yl]-4H-pyrido[1,2-a]pyrimidin-4-one
[1259] 2-(3,4-dimethoxyphenyl)-9-methyl-7-[(3R)-3-methylpiperazin-1-yl]-4H-pyrido[1,2-a]pyrimidin-4-one
[1260] 2-(3-fluoro-4-methoxyphenyl)-9-methyl-7-(1-methyl-1,2,3,6-tetrahydropyridin-4-yl)-4H-pyrido[1,2-a]pyrimidin-4-one
[1261] 7-(3-fluoro-4-methoxyphenyl)-2-(piperidin-4-yl)-4H-pyrido[1,2-a]pyrimidin-4-one
[1262] 7-(3-fluoro-4-methoxyphenyl)-2-(1-methylpiperidin-4-yl)-4H-pyrido[1,2-a]pyrimidin-4-one
[1263] 7-(1-ethyl-1,2,3,6-tetrahydropyridin-4-yl)-2-(4-fluoro-2-methyl-1,3-benzoxazol-6-yl)-4H-pyrido[1,2-a]pyrimidin-4-one
[1264] 2-(4-fluoro-2-methyl-1,3-benzoxazol-6-yl)-7-(1-propyl-1,2,3,6-tetrahydropyridin-4-yl)-4H-pyrido[1,2-a]pyrimidin-4-one
[1265] 2-(3,4-dimethoxyphenyl)-7-[(1R,5S)-8-methyl-8-azabicyclo[3.2.1]oct-3-yl]-4H-pyrido[1,2-a]pyrimidin-4-one
[1266] 2-(3,4-dimethoxyphenyl)-7-[(2R)-2-methylpiperazin-1-yl]-4H-pyrido[1,2-a]pyrimidin-4-one
[1267] 2-(2-methyl-1,3-benzoxazol-6-yl)-7-[(3S)-3-methylpiperazin-1-yl]-4H-quinolizin-4-one
[1268] 2-(2-methyl-1,3-benzoxazol-6-yl)-7-(4-methylpiperazin-1-yl)-4H-quinolizin-4-one
[1269] 7-[(3S)-4-ethyl-3-methylpiperazin-1-yl]-2-(2-methyl-1,3-benzoxazol-6-yl)-4H-quinolizin-4-one
[1270] 7-[(3S)-3,4-dimethylpiperazin-1-yl]-2-(2-methyl-1,3-benzoxazol-6-yl)-4H-quinolizin-4-one
[1271] 7-(4-aminopiperidin-1-yl)-2-(2-methyl-1,3-benzoxazol-6-yl)-4H-quinolizin-4-one
[1272] 2-(3-fluoro-4-methoxyphenyl)-9-methyl-7-[(3S)-3-methylpiperazin-1-yl]-4H-pyrido[1,2-a]pyrimidin-4-one
[1273] 7-[4-(dimethylamino)piperidin-1-yl]-2-(3-fluoro-4-methoxyphenyl)-9-methyl-4H-pyrido[1,2-a]pyrimidin-4-one
[1274] 2-(3-fluoro-4-methoxyphenyl)-9-methyl-7-(1-methylpiperidin-4-yl)-4H-pyrido[1,2-a]pyrimidin-4-one
[1275] 7-[4-(cyclopropylamino)piperidin-1-yl]-2-(3,4-dimethoxyphenyl)-9-methyl-4H-pyrido[1,2-a]pyrimidin-4-one
[1276] 2-(8-chloro-2-methylimidazo[1,2-a]pyridin-6-yl)-7-[(3S)-3,4-dimethylpiperazin-1-yl]-4H-pyrido[1,2-a]pyrimidin-4-one
[1277] 2-(3,4-dimethoxyphenyl)-7-[(3R,5S)-3,5-dimethylpiperazin-1-yl]-9-methyl-4H-pyrido[1,2-a]pyrimidin-4-one
[1278] 2-(3,4-dimethoxyphenyl)-7-[(3R)-3,4-dimethylpiperazin-1-yl]-9-methyl-4H-pyrido[1,2-a]pyrimidin-4-one
[1279] 2-(4,6-dimethylpyrazolo[1,5-a]pyrazin-2-yl)-7-(4-methyl-1,4-diazepan-1-yl)-4H-pyrido[1,2-a]pyrimidin-4-one
[1280] 2-(4,6-dimethylpyrazolo[1,5-a]pyrazin-2-yl)-7-[(3R)-3-methylpiperazin-1-yl]-4H-pyrido[1,2-a]pyrimidin-4-one
[1281] 2-(4,6-dimethylpyrazolo[1,5-a]pyrazin-2-yl)-7-[(8aS)-hexahydropyrrolo[1,2-a]pyrazin-2(1H)-yl]-4H-pyrido[1,2-a]pyrimidin-4-one
[1282] 2-(4,6-dimethylpyrazolo[1,5-a]pyrazin-2-yl)-7-[(8aR)-hexahydropyrrolo[1,2-a]pyrazin-2(1H)-yl]-4H-pyrido[1,2-a]pyrimidin-4-one
[1283] 2-(4,6-di methylpyrazolo[1,5-a]pyrazin-2-yl)-7-(4-ethylpiperazin-1-yl)-4H-pyrido[1,2-a]pyrimidin-4-one
[1284] 7-[4-(dimethylamino)piperidin-1-yl]-2-(4,6-dimethylpyrazolo[1,5-a]pyrazin-2-yl)-4H-pyrido[1,2-a]pyrimidin-4-one
[1285] 7-(3,3-dimethylpiperazin-1-yl)-2-(4,6-dimethylpyrazolo[1,5-a]pyrazin-2-yl)-4H-pyrido[1,2-a]pyrimidin-4-one
[1286] 7-(4-cyclopropylpiperazin-1-yl)-2-(4,6-dimethylpyrazolo[1,5-a]pyrazin-2-yl)-4H-pyrido[1,2-a]pyrimidin-4-one
[1287] 2-(4,6-dimethylpyrazolo[1,5-a]pyrazin-2-yl)-7-(1,2,3,6-tetrahydropyridin-4-yl)-4H-pyrido[1,2-a]pyrimidin-4-one
[1288] 2-(4,6-dimethylpyrazolo[1,5-a]pyrazin-2-yl)-7-[(3R)-4-ethyl-3-methylpiperazin-1-yl]-4H-pyrido[1,2-a]pyrimidin-4-one
[1289] 2-(3,4-dimethoxyphenyl)-9-methyl-7-(4-methylpiperazin-1-yl)-4H-pyrido[1,2-a]pyrimidin-4-one
[1290] 2-(3,4-dimethoxyphenyl)-7-[4-(dimethylamino)piperidin-1-yl]-9-ethyl-4H-pyrido[1,2-a]pyrimidin-4-one
[1291] 2-(3,4-dimethoxyphenyl)-7-[1-(2-hydroxyethyl)-1,2,3,6-tetrahydropyridin-4-yl]-9-methyl-4H-pyrido[1,2-a]pyrimidin-4-one
[1292] 7-[4-(dimethylamino)piperidin-1-yl]-2-(2-methyl-1,3-benzothiazol-5-yl)-4H-pyrido[1,2-a]pyrimidin-4-one
[1293] 7-(4-aminopiperidin-1-yl)-2-(2-methyl-1,3-benzothiazol-5-yl)-4H-pyrido[1,2-a]pyrimidin-4-one
[1294] 7-[(3aR,6aS)-hexahydropyrrolo[3,4-c]pyrrol-2(1H)-yl]-2-(2-methyl-1,3-benzothiazol-5-yl)-4H-pyrido[1,2-a]pyrimidin-4-one
[1295] 2-(4,6-dimethylpyrazolo[1,5-a]pyrazin-2-yl)-7-(1-methyl-1,2,3,6-tetrahydropyridin-4-yl)-4H-pyrido[1,2-a]pyrimidin-4-one
[1296] 2-(4,6-dimethylpyrazolo[1,5-a]pyrazin-2-yl)-7-(1-ethyl-1,2,3,6-tetrahydropyridin-4-yl)-4H-pyrido[1,2-a]pyrimidin-4-one
[1297] 2-(4,6-dimethylpyrazolo[1,5-a]pyrazin-2-yl)-7-(1-propyl-1,2,3,6-tetrahydropyridin-4-yl)-4H-pyrido[1,2-a]pyrimidin-4-one
[1298] 2-(3,4-dimethoxyphenyl)-7-(1,2,3,6-tetrahydropyridin-4-yl)-4H-pyrimido[1,2-a]pyrimidin-4-one
[1299] 7-(1-cyclopropyl-1,2,3,6-tetrahydropyridin-4-yl)-2-(4,6-dimethylpyrazolo[1,5-a]pyrazin-2-yl)-4H-pyrido[1,2-a]pyrimidin-4-one
[1300] 2-(4,6-dimethylpyrazolo[1,5-a]pyrazin-2-yl)-7-[1-(propan-2-yl)-1,2,3,6-tetrahydropyridin-4-yl]-4H-pyrido[1,2-a]pyrimidin-4-one
[1301] 7-(1-cyclobutyl-1,2,3,6-tetrahydropyridin-4-yl)-2-(4,6-dimethylpyrazolo[1,5-a]pyrazin-2-yl)-4H-pyrido[1,2-a]pyrimidin-4-one
[1302] 2-(4,6-dimethylpyrazolo[1,5-a]pyrazin-2-yl)-7-[1-(oxetan-3-yl)-1,2,3,6-tetrahydropyridin-4-yl]-4H-pyrido[1,2-a]pyrinmidin-4-one
[1303] 2-(3,4-dimethoxyphenyl)-9-methyl-7-[4-(methylamino)piperidin-1-yl]-4H-pyrido[1,2-a]pyrimidin-4-one
[1304] 2-(3,4-dimethoxyphenyl)-7-[4-(ethylamino)piperidin-1-yl]-9-methyl-4H-pyrido[1,2-a]pyrimidin-4-one
[1305] 2-(3,4-dimethoxyphenyl)-8-methyl-7-(piperazin-1-yl)-4H-pyrido[1,2-a]pyrimidin-4-one
[1306] 2-(3,4-dimethoxyphenyl)-7-[4-(propan-2-ylamino)piperidin-1-yl]-4H-pyrido[1,2-a]pyrimidin-4-one
[1307] 7-(1-cyclobutyl-1,2,3,6-tetrahydropyridin-4-yl)-2-(3,4-dimethoxyphenyl)-4H-pyrido[1,2-a]pyrimidin-4-one
[1308] 2-(3,4-dimethoxyphenyl)-7-[1-(propan-2-yl)-1,2,3,6-tetrahydropyridin-4-yl]-4H-pyrido[1,2-a]pyrimidin-4-one
[1309] 2-(3,4-dimethoxyphenyl)-7-[1-(oxetan-3-yl)-1,2,3,6-tetrahydropyridin-4-yl]-4H-pyrido[1,2-a]pyrimidin-4-one
[1310] 2-(3,4-dimethoxyphenyl)-7-(1-propyl-1,2,3,6-tetrahydropyridin-4-yl)-4H-pyrido[1,2-a]pyrimidin-4-one
[1311] 2-(3,4-dimethoxyphenyl)-7-[4-(methylamino)cyclohex-1-en-1-yl]-4H-pyrido[1,2-a]pyrimidin-4-one
[1312] 2-(3,4-dimethoxyphenyl)-7-[4-(dimethylamino)cyclohex-1-en-1-yl]-4H-pyrido[1,2-a]pyrimidin-4-one
[1313] 2-(3,4-dimethoxyphenyl)-7-{4-[ethyl(methyl)amino]cyclohex-1-en-1-yl}-4H-pyrido[1,2-a]pyrimidin-4-one
[1314] 2-(3,4-dimethoxyphenyl)-7-{4-[methyl(propyl)amino]cyclohex-1-en-1-yl}-4H-pyrido[1,2-a]pyrimidin-4-one
[1315] 2-(3,4-dimethoxyphenyl)-7-(1-ethyl-1,2,3,6-tetrahydropyridin-4-yl)-4H-pyrido[1,2-a]pyrimidin-4-one
[1316] 7-(3,4-dimethoxyphenyl)-2-(1,2,3,6-tetrahydropyridin-4-yl)-4H-pyrido[1,2-a]pyrimidin-4-one
[1317] 7-(8-fluoro-2-methylimidazo[1,2-a]pyridin-6-yl)-2-(1,2,3,6-tetrahydropyridin-4-yl)-4H-pyrido[1,2-a]pyrimidin-4-one
[1318] 2-(8-fluoro-2-methylimidazo[1,2-a]pyridin-6-yl)-7-[4-(propan-2-yl)piperazin-1-yl]-4H-pyrido[1,2-a]pyrimidin-4-one
[1319] 2-(8-chloro-2-methylimidazo[1,2-a]pyridin-6-yl)-7-[4-(propan-2-yl)piperazin-1-yl]-4H-pyrido[1,2-a]pyrimidin-4-one
[1320] 7-(2-methylimidazo[1,2-a]pyridin-6-yl)-2-(1,2,3,6-tetrahydropyridin-4-yl)-4H-pyrido[1,2-a]pyrimidin-4-one
[1321] 7-(2-methylimidazo[1,2-a]pyridin-6-yl)-2-(1-methyl-1,2,3,6-tetrahydropyridin-4-yl)-4H-pyrido[1,2-a]pyrimidin-4-one
[1322] 7-(3,4-dimethoxyphenyl)-2-(1-methyl-1,2,3,6-tetrahydropyridin-4-yl)-4H-pyrido[1,2-a]pyrimidin-4-one
[1323] 2-(3,4-dimethoxyphenyl)-9-methyl-7-(1-propyl-1,2,3,6-tetrahydropyridin-4-yl)-4H-pyrido[1,2-a]pyrimidin-4-one
[1324] 7-(1-cyclobutyl-1,2,3,6-tetrahydropyridin-4-yl)-2-(3,4-dimethoxyphenyl)-9-methyl-4H-pyrido[1,2-a]pyrimidin-4-one
[1325] 2-(2-methyl-1,3-benzothiazol-6-yl)-7-(piperidin-4-yl)-4H-pyrimido[1,2-b]pyridazin-4-one
[1326] 7-(4-aminopiperidin-1-yl)-2-(2-methyl-1,3-benzothiazol-6-yl)-4H-pyrido[1,2-a]pyrimidin-4-one
[1327] 7-(3-aminopyrrolidin-1-yl)-2-(2-methyl-1,3-benzothiazol-6-yl)-4H-pyrido[1,2-a]pyrimidin-4-one
[1328] 7-[(3R)-3-(dimethylamino)pyrrolidin-1-yl]-2-(2-methyl-1,3-benzothiazol-6-yl)-4H-pyrido[1,2-a]pyrimidin-4-one
[1329] 2-(2-methyl-1,3-benzothiazol-6-yl)-7-(1,2,3,6-tetrahydropyridin-4-yl)-4H-pyrido[1,2-a]pyrimidin-4-one
[1330] 2-(8-fluoro-2-methylimidazo[1,2-a]pyridin-6-yl)-7-[4-(2-methoxyethyl)piperazin-1-yl]-4H-pyrido[1,2-a]pyrimidin-4-one
[1331] 2-(3,4-dimethoxyphenyl)-9-methyl-7-[1-(oxetan-3-yl)-1,2,3,6-tetrahydropyridin-4-yl]-4H-pyrido[1,2-a]pyrimidin-4-one
[1332] 2-(3,4-dimethoxyphenyl)-9-methyl-7-[1-(propan-2-yl)-1,2,3,6-tetrahydropyridin-4-yl]-4H-pyrido[1,2-a]pyrimidin-4-one
[1333] 2-(3,4-dimethoxyphenyl)-7-(1-ethyl-1,2,3,6-tetrahydropyridin-4-yl)-9-methyl-4H-pyrido[1,2-a]pyrimidin-4-one
[1334] 2-(3,4-dimethoxyphenyl)-8-methyl-7-(1,2,3,6-tetrahydropyridin-4-yl)-4H-pyrido[1,2-a]pyrimidin-4-one
[1335] 7-(1-cyclopropyl-1,2,3,6-tetrahydropyridin-4-yl)-2-(3,4-dimethoxyphenyl)-9-methyl-4H-pyrido[1,2-a]pyrimidin-4-one
[1336] 2-(3,4-dimethoxyphenyl)-8-methyl-7-(1-methyl-1,2,3,6-tetrahydropyridin-4-yl)-4H-pyrido[1,2-a]pyrimidin-4-one
[1337] 2-(2-methyl-1,3-benzothiazol-6-yl)-7-(1-methyl-1,2,3,6-tetrahydropyridin-4-yl)-4H-pyrido[1,2-a]pyrimidin-4-one
[1338] 7-[1-(2-hydroxyethyl)-1,2,3,6-tetrahydropyridin-4-yl]-2-(2-methyl-1,3-benzothiazol-6-yl)-4H-pyrido[1,2-a]pyrimidin-4-one
[1339] 2-(2-methyl-1,3-benzothiazol-6-yl)-7-[1-(propan-2-yl)-1,2,3,6-tetrahydropyridin-4-yl]-4H-pyrido[1,2-a]pyrimidin-4-one
[1340] 7-(1-cyclopropyl-1,2,3,6-tetrahydropyridin-4-yl)-2-(2-methyl-1,3-benzothiazol-6-yl)-4H-pyrido[1,2-a]pyrimidin-4-one
[1341] 7-(1-ethyl-1,2,3,6-tetrahydropyridin-4-yl)-2-(2-methyl-1,3-benzothiazol-6-yl)-4H-pyrido[1,2-a]pyrimidin-4-one
[1342] 7-[(3R)-3,4-dimethylpiperazin-1-yl]-2-(4,6-dimethylpyrazolo[1,5-a]pyrazin-2-yl)-4H-pyrido[1,2-a]pyrimidin-4-one
[1343] 2-(3,4-dimethoxyphenyl)-7-(1,2,3,6-tetrahydropyridin-4-yl)-4H-pyrimido[1,2-b]pyridazin-4-one
[1344] 7-[(1S,4S)-2,5-diazabicyclo[2.2.1]hept-2-yl]-2-(4,6-dimethylpyrazolo[1,5-a]pyrazin-2-yl)-4H-pyrido[1,2-a]pyrimidin-4-one
[1345] 2-(4,6-dimethylpyrazolo[1,5-a]pyrazin-2-yl)-7-[(1S,4S)-5-methyl-2,5-diazabicyclo[2.2.1]hept-2-yl]-4H-pyrido[1,2-a]pyrimidin-4-one
[1346] 2-(4,6-dimethylpyrazolo[1,5-a]pyrazin-2-yl)-7-[(1S,4S)-5-ethyl-2,5-diazabicyclo[2.2.1]hept-2-yl]-4H-pyrido[1,2-a]pyrimidin-4-one
[1347] 2-(3,4-dimethoxyphenyl)-7-(1,2,3,6-tetrahydropyridin-4-yl)-4H-pyrazino[1,2-a]pyrimidin-4-one
[1348] 2-(3-fluoro-4-methoxyphenyl)-7-(piperidin-4-yl)-4H-pyrido[1,2-a]pyrimidin-4-one
[1349] 2-(3,4-dimethoxyphenyl)-7-(1-ethylpiperidin-4-yl)-4H-pyrido[1,2-a]pyrimidin-4-one
[1350] 2-(3,4-dimethoxyphenyl)-7-[cis-4-(methylamino)cyclohexyl]-4H-pyrido[1,2-a]pyrimidin-4-one
[1351] 2-(3,4-dimethoxyphenyl)-7-(piperidin-3-yl)-4H-pyrido[1,2-a]pyrimidin-4-one
[1352] 2-(3,4-dimethoxyphenyl)-9-methyl-7-[4-(propylamino)piperidin-1-yl]-4H-pyrido[1,2-a]pyrimidin-4-one
[1353] 2-(3,4-dimethoxyphenyl)-9-ethyl-7-(1,2,3,6-tetrahydropyridin-4-yl)-4H-pyrido[1,2-a]pyrimidin-4-one
[1354] 7-(2-methylimidazo[1,2-a]pyridin-6-yl)-2-(piperidin-4-yl)-4H-pyrido[1,2-a]pyrimidin-4-one
[1355] 7-(8-fluoro-2-methylimidazo[1,2-a]pyridin-6-yl)-2-(piperidin-4-yl)-4H-pyrido[1,2-a]pyrimidin-4-one
[1356] 7-(8-fluoro-2-methylimidazo[1,2-a]pyridin-6-yl)-2-(1-methyl-1,2,3,6-tetrahydropyridin-4-yl)-4H-pyrido[1,2-a]pyrimidin-4-one
[1357] 7-(4-cyclopropylpiperazin-1-yl)-2-(8-fluoro-2-methylimidazo[1,2-a]pyridin-6-yl)-4H-pyrido[1,2-a]pyrimidin-4-one
[1358] 2-(1,3-dimethylpyrrolo[1,2-a]pyrazin-7-yl)-7-(1,2,3,6-tetrahydropyridin-4-yl)-4H-pyrazino[1,2-a]pyrimidin-4-one
[1359] 2-(3,4-dimethoxyphenyl)-7-[(8aR)-hexahydropyrrolo[1,2-a]pyrazin-2(1H)-yl]-9-methyl-4H-pyrido[1,2-a]pyrimidin-4-one
[1360] 2-(3,4-dimethoxyphenyl)-9-ethyl-7-(1-methyl-1,2,3,6-tetrahydropyridin-4-yl)-4H-pyrido[1,2-a]pyrimidin-4-one
[1361] 2-(3,4-dimethoxyphenyl)-9-methyl-7-[4-(propan-2-ylamino)piperidin-1-yl]-4H-pyrido[1,2-a]pyrimidin-4-one
[1362] 2-(3,4-dimethoxyphenyl)-7-[(8aS)-hexahydropyrrolo[1,2-a]pyrazin-2(1H)-yl]-9-methyl-4H-pyrido[1,2-a]pyrimidin-4-one
[1363] 2-(3,4-dimethoxyphenyl)-9-ethyl-7-(1-ethyl-1,2,3,6-tetrahydropyridin-4-yl)-4H-pyrido[1,2-a]pyrimidin-4-one
[1364] 2-(3,4-dimethoxyphenyl)-9-methyl-7-[4-(morpholin-4-yl)piperidin-1-yl]-4H-pyrido[1,2-a]pyrimidin-4-one
[1365] 2-(6-methylpyrazolo[1,5-a]pyrazin-2-yl)-7-(piperazin-1-yl)-4H-pyrido[1,2-a]pyrimidin-4-one
[1366] 2-(2-methyl-1,3-benzoxazol-6-yl)-7-(1,2,3,6-tetrahydropyridin-4-yl)-4H-pyrazino[1,2-a]pyrimidin-4-one hydrochloride (1:1)
[1367] 2-(2-methyl-1,3-benzoxazol-6-yl)-7-(1-methyl-1,2,3,6-tetrahydropyridin-4-yl)-4H-pyrazino[1,2-a]pyrimidin-4-one
[1368] 7-(1-ethyl-1,2,3,6-tetrahydropyridin-4-yl)-2-(2-methyl-1,3-benzoxazol-6-yl)-4H-pyrazino[1,2-a]pyrimidin-4-one
[1369] 2-(2-methyl-1,3-benzothiazol-6-yl)-7-(piperidin-4-yl)-4H-pyrido[1,2-a]pyrimidin-4-one
[1370] 2-(4,6-dimethylpyrazolo[1,5-a]pyrazin-2-yl)-7-[4-(pyrrolidin-1-yl)piperidin-1-yl]-4H-pyrido[1,2-a]pyrimidin-4-one
[1371] 7-(1,4′-bipiperidin-1′-yl)-2-(4,6-dimethylpyrazolo[1,5-a]pyrazin-2-yl)-4H-pyrido[1,2-a]pyrimidin-4-one
[1372] 2-(4,6-dimethylpyrazolo[1,5-a]pyrazin-2-yl)-7-[4-(4-methylpiperazin-1-yl)piperidin-1-yl]-4H-pyrido[1,2-a]pyrimidin-4-one
[1373] 2-(4,6-dimethylpyrazolo[1,5-a]pyrazin-2-yl)-7-[4-(morpholin-4-yl)piperidin-1-yl]-4H-pyrido[1,2-a]pyrimidin-4-one
[1374] 2-(2-methylimidazo[1,2-a]pyridin-6-yl)-7-(1,2,3,6-tetrahydropyridin-4-yl)-4H-pyrido[1,2-a]pyrimidin-4-one
[1375] 2-(2-methylimidazo[1,2-a]pyridin-6-yl)-7-(1-methyl-1,2,3,6-tetrahydropyridin-4-yl)-4H-pyrido[1,2-a]pyrimidin-4-one
[1376] 7-(1-ethyl-1,2,3,6-tetrahydropyridin-4-yl)-2-(2-methylimidazo[1,2-a]pyridin-6-yl)-4H-pyrido[1,2-a]pyrimidin-4-one
[1377] 7-[4-(dimethylamino)piperidin-1-yl]-2-(2-methylimidazo[1,2-a]pyridin-6-yl)-4H-pyrido[1,2-a]pyrimidin-4-one
[1378] 2-(3,4-dimethoxyphenyl)-7-{4-[(2-hydroxyethyl)amino]piperidin-1-yl}-9-methyl-4H-pyrido[1,2-a]pyrimidin-4-one
[1379] 2-(3,4-dimethoxyphenyl)-9-ethyl-7-(1-methylpiperidin-4-yl)-4H-pyrido[1,2-a]pyrimidin-4-one
[1380] 7-[4-(diethylamino)piperidin-1-yl]-2-(3,4-dimethoxyphenyl)-9-methyl-4H-pyrido[1,2-a]pyrimidin-4-one
[1381] 2-(3,4-dimethoxyphenyl)-9-ethyl-7-(1-ethylpiperidin-4-yl)-4H-pyrido[1,2-a]pyrimidin-4-one
[1382] 2-(2-methylimidazo[1,2-a]pyridin-6-yl)-7-[4-(pyrrolidin-1-yl)piperidin-1-yl]-4H-pyrido[1,2-a]pyrimidin-4-one
[1383] 2-(2-methylimidazo[1,2-a]pyridin-6-yl)-7-(piperidin-4-yl)-4H-pyrido[1,2-a]pyrimidin-4-one
[1384] 2-(2-methyl-1,3-benzothiazol-6-yl)-7-(1-methylpiperidin-4-yl)-4H-pyrido[1,2-a]pyrimidin-4-one
[1385] 7-(4-methylpiperazin-1-yl)-2-(6-methylpyrazolo[1,5-a]pyrazin-2-yl)-4H-pyrido[1,2-a]pyrimidin-4-one
[1386] 7-[(3S)-3-methylpiperazin-1-yl]-2-(6-methylpyrazolo[1,5-a]pyrazin-2-yl)-4H-pyrido[1,2-a]pyrimidin-4-one
[1387] 7-[(3R,5S)-3,5-dimethylpiperazin-1-yl]-2-(6-methylpyrazolo[1,5-a]pyrazin-2-yl)-4H-pyrido[1,2-a]pyrimidin-4-one
[1388] 2-(1-methyl-1H-indazol-5-yl)-7-(1,2,3,6-tetrahydropyridin-4-yl)-4H-pyrido[1,2-a]pyrimidin-4-one
[1389] 2-[6-(dimethylamino)pyridin-3-yl]-7-(1,2,3,6-tetrahydropyridin-4-yl)-4H-pyrido[1,2-a]pyrimidin-4-one
[1390] 7-[4-(diethylamino)piperidin-1-yl]-2-(2-methylimidazo[1,2-a]pyridin-6-yl)-4H-pyrido[1,2-a]pyrimidin-4-one
[1391] 2-(3,4-dimethoxyphenyl)-7-{4-[(2-hydroxyethyl)(methyl)amino]piperidin-1-yl}-9-methyl-4H-pyrido[1,2-a]pyrimidin-4-one
[1392] 2-(3,4-dimethoxyphenyl)-9-ethyl-7-[(3R)-3-methylpiperazin-1-yl]-4H-pyrido[1,2-a]pyrimidin-4-one
[1393] 2-(2-methylimidazo[1,2-a]pyridin-6-yl)-7-(1-methylpiperidin-4-yl)-4H-pyrido[1,2-a]pyrimidin-4-one
[1394] 2-(1-methyl-1H-indazol-5-yl)-7-(1-methyl-1,2,3,6-tetrahydropyridin-4-yl)-4H-pyrido[1,2-a]pyrimidin-4-one
[1395] 2-[6-(dimethylamino)pyridin-3-yl]-7-(1-methyl-1,2,3,6-tetrahydropyridin-4-yl)-4H-pyrido[1,2-a]pyrimidin-4-one
[1396] 7-[4-(diethylamino)piperidin-1-yl]-2-(4,6-dimethylpyrazolo[1,5-a]pyrazin-2-yl)-4H-pyrido[1,2-a]pyrimidin-4-one
[1397] 2-(4,6-dimethylpyrazolo[1,5-a]pyrazin-2-yl)-7-(piperidin-4-yl)-4H-pyrido[1,2-a]pyrimidin-4-one
[1398] 2-(4,6-dimethylpyrazolo[1,5-a]pyrazin-2-yl)-7-(1-methylpiperidin-4-yl)-4H-pyrido[1,2-a]pyrimidin-4-one
[1399] 2-(4,6-dimethylpyrazolo[1,5-a]pyrazin-2-yl)-7-(1-ethylpiperidin-4-yl)-4H-pyrido[1,2-a]pyrimidin-4-one
[1400] 2-(3,4-dimethoxyphenyl)-9-ethyl-7-[(8aR)-hexahydropyrrolo[1,2-a]pyrazin-2(1H)-yl]-4H-pyrido[1,2-a]pyrimidin-4-one
[1401] 2-(3,4-dimethoxyphenyl)-7-{4-[(2-methoxyethyl)amino]piperidin-1-yl}-9-methyl-4H-pyrido[1,2-a]pyrimidin-4-one
[1402] 2-(4,6-dimethylpyrazolo[1,5-a]pyrazin-2-yl)-9-methyl-7-(4-methylpiperazin-1-yl)-4H-pyrido[1,2-a]pyrimidin-4-one
[1403] 2-(4,6-dimethylpyrazolo[1,5-a]pyrazin-2-yl)-7-[(8aR)-hexahydropyrrolo[1,2-a]pyrazin-2(1H)-yl]-9-methyl-4H-pyrido[1,2-a]pyrimidin-4-one
[1404] 7-[4-(dimethylamino)piperidin-1-yl]-2-(4,6-dimethylpyrazolo[1,5-a]pyrazin-2-yl)-9-methyl-4H-pyrido[1,2-a]pyrimidin-4-one
[1405] 7-(2-methylimidazo[1,2-a]pyridin-6-yl)-2-(1-methylpiperidin-4-yl)-4H-pyrido[1,2-a]pyrimidin-4-one
[1406] 7-(2-methylimidazo[1,2-a]pyridin-6-yl)-2-[1-(propan-2-yl)piperidin-4-yl]-4H-pyrido[1,2-a]pyrimidin-4-one
[1407] 7-(8-fluoro-2-methylimidazo[1,2-a]pyridin-6-yl)-2-(1-methylpiperidin-4-yl)-4H-pyrido[1,2-a]pyrimidin-4-one
[1408] 7-(1-ethyl-1,2,3,6-tetrahydropyridin-4-yl)-2-(1-methyl-1H-indazol-5-yl)-4H-pyrido[1,2-a]pyrimidin-4-one
[1409] 2-(1-methyl-1H-indazol-5-yl)-7-(1-propyl-1,2,3,6-tetrahydropyridin-4-yl)-4H-pyrido[1,2-a]pyrimidin-4-one
[1410] 2-[6-(dimethylamino)pyridin-3-yl]-7-(piperidin-4-yl)-4H-pyrido[1,2-a]pyrimidin-4-one
[1411] 7-(4-ethylpiperazin-1-yl)-2-(6-methylpyrazolo[1,5-a]pyrazin-2-yl)-4H-pyrido[1,2-a]pyrimidin-4-one
[1412] 7-[(8aR)-hexahydropyrrolo[1,2-a]pyrazin-2(1H)-yl]-2-(6-methylpyrazolo[1,5-a]pyrazin-2-yl)-4H-pyrido[1,2-a]pyrimidin-4-one
[1413] 7-[4-(dimethylamino)piperidin-1-yl]-2-(6-methylpyrazolo[1,5-a]pyrazin-2-yl)-4H-pyrido[1,2-a]pyrimidin-4-one
[1414] 7-[4-(2-hydroxyethyl)piperazin-1-yl]-2-(6-methylpyrazolo[1,5-a]pyrazin-2-yl)-4H-pyrido[1,2-a]pyrimidin-4-one
[1415] 2-(2-methylimidazo[1,2-a]pyridin-6-yl)-7-(1-propylpiperidin-4-yl)-4H-pyrido[1,2-a]pyrimidin-4-one
[1416] 7-[1-(2-hydroxyethyl)-1,2,3,6-tetrahydropyridin-4-yl]-2-(1-methyl-1H-indazol-5-yl)-4H-pyrido[1,2-a]pyrimidin-4-one
[1417] 7-[(3R)-3-methylpiperazin-1-yl]-2-(6-methylpyrazolo[1,5-a]pyrazin-2-yl)-4H-pyrido[1,2-a]pyrimidin-4-one
[1418] 2-(6-methylpyrazolo[1,5-a]pyrazin-2-yl)-7-(1,2,3,6-tetrahydropyridin-4-yl)-4H-pyrido[1,2-a]pyrimidin-4-one
[1419] 2-(2-methyl-2H-indazol-5-yl)-7-(1,2,3,6-tetrahydropyridin-4-yl)-4H-pyrido[1,2-a]pyrimidin-4-one
[1420] 2-(1-methyl-1H-indazol-5-yl)-7-(1-methylpiperidin-4-yl)-4H-pyrido[1,2-a]pyrimidin-4-one
[1421] 2-(2-methyl-2H-indazol-5-yl)-7-(1-methyl-1,2,3,6-tetrahydropyridin-4-yl)-4H-pyrido[1,2-a]pyrimidin-4-one
[1422] 7-(1-ethyl-1,2,3,6-tetrahydropyridin-4-yl)-2-(2-methyl-2H-indazol-5-yl)-4H-pyrido[1,2-a]pyrimidin-4-one
[1423] 7-(1-ethylpiperidin-4-yl)-2-(2-methylimidazo[1,2-a]pyridin-6-yl)-4H-pyrido[1,2-a]pyrimidin-4-one
[1424] 2-(1,3-dimethylpyrrolo[1,2-a]pyrazin-7-yl)-7-[1-(propan-2-yl)-1,2,3,6-tetrahydropyridin-4-yl]-4H-pyrazino[1,2-a]pyrimidin-4-one
[1425] 2-(4,6-dimethylpyrazolo[1,5-a]pyrazin-2-yl)-9-methyl-7-(1,2,3,6-tetrahydropyridin-4-yl)-4H-pyrido[1,2-a]pyrimidin-4-one
[1426] 2-(4,6-dimethylpyrazolo[1,5-a]pyrazin-2-yl)-9-methyl-7-(1-methyl-1,2,3,6-tetrahydropyridin-4-yl)-4H-pyrido[1,2-a]pyrimidin-4-one
[1427] 2-(4,6-dimethylpyrazolo[1,5-a]pyrazin-2-yl)-7-(1-ethyl-1,2,3,6-tetrahydropyridin-4-yl)-9-methyl-4H-pyrido[1,2-a]pyrimidin-4-one
[1428] 7-(1-cyclopropyl-1,2,3,6-tetrahydropyridin-4-yl)-2-(4,6-dimethylpyrazolo[1,5-a]pyrazin-2-yl)-9-methyl-4H-pyrido[1,2-a]pyrimidin-4-one
[1429] 2-(6-methylpyrazolo[1,5-a]pyrazin-2-yl)-7-(1-methyl-1,2,3,6-tetrahydropyridin-4-yl)-4H-pyrido[1,2-a]pyrimidin-4-one
[1430] 7-(1-ethyl-1,2,3,6-tetrahydropyridin-4-yl)-2-(6-methylpyrazolo[1,5-a]pyrazin-2-yl)-4H-pyrido[1,2-a]pyrimidin-4-one
[1431] 2-(5,7-dimethylfuro[2,3-c]pyridin-2-yl)-7-(piperazin-1-yl)-4H-pyrido[1,2-a]pyrimidin-4-one
[1432] 2-(5,7-dimethylfuro[2,3-c]pyridin-2-yl)-7-(4-methylpiperazin-1-yl)-4H-pyrido[1,2-a]pyrimidin-4-one
[1433] 2-(5,7-dimethylfuro[2,3-c]pyridin-2-yl)-7-[(3S)-3-methylpiperazin-1-yl]-4H-pyrido[1,2-a]pyrimidin-4-one
[1434] 2-(1-methyl-1H-indazol-5-yl)-7-(4-methylpiperazin-1-yl)-4H-pyrido[1,2-a]pyrimidin-4-one
[1435] 2-(1-methyl-1H-indazol-5-yl)-7-(piperazin-1-yl)-4H-pyrido[1,2-a]pyrimidin-4-one
[1436] 7-[4-(dimethylamino)piperidin-1-yl]-2-(1-methyl-1H-indazol-5-yl)-4H-pyrido[1,2-a]pyrimidin-4-one
[1437] 7-(4-methyl-1,4-diazepan-1-yl)-2-(1-methyl-1H-indazol-5-yl)-4H-pyrido[1,2-a]pyrimidin-4-one
[1438] 7-(1-ethyl-1,2,3,6-tetrahydropyridin-4-yl)-2-(2-methyl-1,3-benzoxazol-6-yl)-4H-pyrimido[1,2-b]pyridazin-4-one
[1439] 2-(8-chloro-2-methylimidazo[1,2-a]pyridin-6-yl)-7-(4-ethylpiperazin-1-yl)-4H-pyrido[1,2-a]pyrimidin-4-one
[1440] 2-(8-chloro-2-methylimidazo[1,2-a]pyridin-6-yl)-7-[(3R)-4-ethyl-3-methylpiperazin-1-yl]-4H-pyrido[1,2-a]pyrimidin-4-one
[1441] 2-(8-chloro-2-methylimidazo[1,2-a]pyridin-6-yl)-7-[(3S)-4-ethyl-3-methylpiperazin-1-yl]-4H-pyrido[1,2-a]pyrimidin-4-one
[1442] 2-(8-chloro-2-methylimidazo[1,2-a]pyridin-6-yl)-7-[(3R)-3-methyl-4-(propan-2-yl)piperazin-1-yl]-4H-pyrido[1,2-a]pyrimidin-4-one
[1443] 2-(8-chloro-2-methylimidazo[1,2-a]pyridin-6-yl)-7-[(3S)-3-methyl-4-(propan-2-yl)piperazin-1-yl]-4H-pyrido[1,2-a]pyrimidin-4-one
[1444] 2-(2-methyl-1,3-benzoxazol-6-yl)-7-(piperidin-4-yl)-4H-pyrimido[1,2-b]pyridazin-4-one
[1445] 2-(2-methyl-1,3-benzoxazol-6-yl)-7-(1-methylpiperidin-4-yl)-4H-pyrimido[1,2-b]pyridazin-4-one
[1446] 7-(1-ethylpiperidin-4-yl)-2-(2-methyl-1,3-benzoxazol-6-yl)-4H-pyrimido[1,2-b]pyridazin-4-one
[1447] 2-(4,6-dimethylpyrazolo[1,5-a]pyrazin-2-yl)-7-(piperidin-4-yl)-4H-pyrazino[1,2-a]pyrimidin-4-one
[1448] 2-(4,6-dimethylpyrazolo[1,5-a]pyrazin-2-yl)-7-(1-methylpiperidin-4-yl)-4H-pyrazino[1,2-a]pyrimidin-4-one
[1449] 2-(4,6-dimethylpyrazolo[1,5-a]pyrazin-2-yl)-7-(1-ethylpiperidin-4-yl)-4H-pyrazino[1,2-a]pyrimidin-4-one
[1450] 2-(1-methyl-1H-indazol-5-yl)-7-(1,2,3,6-tetrahydropyridin-4-yl)-4H-pyrazino[1,2-a]pyrimidin-4-one
[1451] 2-(1-methyl-1H-indazol-5-yl)-7-(1-methyl-1,2,3,6-tetrahydropyridin-4-yl)-4H-pyrazino[1,2-a]pyrimidin-4-one
[1452] 7-(1-ethyl-1,2,3,6-tetrahydropyridin-4-yl)-2-(1-methyl-1H-indazol-5-yl)-4H-pyrazino[1,2-a]pyrimidin-4-one
[1453] 2-(4,6-dimethylpyrazolo[1,5-a]pyrazin-2-yl)-7-(4-ethylpiperazin-1-yl)-9-methyl-4H-pyrido[1,2-a]pyrimidin-4-one
[1454] 2-(4,6-dimethylpyrazolo[1,5-a]pyrazin-2-yl)-9-methyl-7-[(3R)-3-methylpiperazin-1-yl]-4H-pyrido[1,2-a]pyrimidin-4-one
[1455] 7-[(3R)-3,4-dimethylpiperazin-1-yl]-2-(4,6-dimethylpyrazolo[1,5-a]pyrazin-2-yl)-9-methyl-4H-pyrido[1,2-a]pyrimidin-4-one
[1456] 2-(4,6-dimethylpyrazolo[1,5-a]pyrazin-2-yl)-7-[(3R)-4-ethyl-3-methylpiperazin-1-yl]-9-methyl-4H-pyrido[1,2-a]pyrimidin-4-one
[1457] 2-(4,6-dimethylpyrazolo[1,5-a]pyrazin-2-yl)-7-(piperidin-4-yl)-4H-pyrimido[1,2-b]pyridazin-4-one
[1458] 2-(4,6-dimethylpyrazolo[1,5-a]pyrazin-2-yl)-7-(1-methylpiperidin-4-yl)-4H-pyrimido[1,2-b]pyridazin-4-one
[1459] 2-(4,6-dimethylpyrazolo[1,5-a]pyrazin-2-yl)-7-(1-ethylpiperidin-4-yl)-4H-pyrimido[1,2-b]pyridazin-4-one
[1460] 2-(4,6-dimethylpyrazolo[1,5-a]pyrazin-2-yl)-7-(octahydro-5H-pyrrolo[3,2-c]pyridin-5-yl)-4H-pyrido[1,2-a]pyrimidin-4-one
[1461] 2-(8-chloro-2-methylimidazo[1,2-a]pyridin-6-yl)-7-(piperidin-4-yl)-4H-pyrido[1,2-a]pyrimidin-4-one
[1462] 2-(8-chloro-2-methylimidazo[1,2-a]pyridin-6-yl)-7-(1-methylpiperidin-4-yl)-4H-pyrido[1,2-a]pyrimidin-4-one
[1463] 2-(8-chloro-2-methylimidazo[1,2-a]pyridin-6-yl)-7-(1-ethylpiperidin-4-yl)-4H-pyrido[1,2-a]pyrimidin-4-one
[1464] 2-(8-chloro-2-methylimidazo[1,2-a]pyridin-6-yl)-7-[1-(propan-2-yl)piperidin-4-yl]-4H-pyrido[1,2-a]pyrimidin-4-one
[1465] 2-(4,6-dimethylpyrazolo[1,5-a]pyrazin-2-yl)-9-methyl-7-(4-methyl-1,4-diazepan-1-yl)-4H-pyrido[1,2-a]pyrimidin-4-one
[1466] 2-(2-methyl-2H-indazol-5-yl)-7-(piperidin-4-yl)-4H-pyrimido[1,2-b]pyridazin-4-one
[1467] 2-(2-methyl-2H-indazol-5-yl)-7-(1-methylpiperidin-4-yl)-4H-pyrimido[1,2-b]pyridazin-4-one
[1468] 7-(1-ethylpiperidin-4-yl)-2-(2-methyl-2H-indazol-5-yl)-4H-pyrimido[1,2-b]pyridazin-4-one
[1469] 2-(8-chloro-2-methylimidazo[1,2-a]pyridin-6-yl)-7-(1-methylpiperidin-4-yl)-4H-pyrimido[1,2-b]pyridazin-4-one
[1470] 2-(8-chloro-2-methylimidazo[1,2-a]pyridin-6-yl)-7-(1-ethylpiperidin-4-yl)-4H-pyrimido[1,2-b]pyridazin-4-one
[1471] 2-(8-chloro-2-methylimidazo[1,2-a]pyridin-6-yl)-7-[1-(2-hydroxyethyl)piperidin-4-yl]-4H-pyrimido[1,2-b]pyridazin-4-one
[1472] 2-(5,7-dimethylfuro[2,3-c]pyridin-2-yl)-7-[(3R,5S)-3,5-dimethylpiperazin-1-yl]-4H-pyrido[1,2-a]pyrimidin-4-one
[1473] 7-[4-(dimethylamino)piperidin-1-yl]-2-(5,7-dimethylfuro[2,3-c]pyridin-2-yl)-4H-pyrido[1,2-a]pyrimidin-4-one
[1474] 2-(5,7-dimethylfuro[2,3-c]pyridin-2-yl)-7-[4-(2-hydroxyethyl)piperazin-1-yl]-4H-pyrido[1,2-a]pyrimidin-4-one
[1475] 2-(4,6-dimethylpyrazolo[1,5-a]pyrazin-2-yl)-7-[1-(2-hydroxyethyl)piperidin-4-yl]-4H-pyrido[1,2-a]pyrimidin-4-one
[1476] 2-(4,6-dimethylpyrazolo[1,5-a]pyrazin-2-yl)-7-[4-(2-hydroxyethyl)piperazin-1-yl]-4H-pyrido[1,2-a]pyrimidin-4-one
[1477] 2-(4,6-dimethylpyrazolo[1,5-a]pyrazin-2-yl)-7-[(3R)-4-(2-hydroxyethyl)-3-methylpiperazin-1-yl]-4H-pyrido[1,2-a]pyrimidin-4-one
[1478] 2-(8-chloro-2-methylimidazo[1,2-a]pyridin-6-yl)-7-[(3S)-4-(2-methoxyethyl)-3-methylpiperazin-1-yl]-4H-pyrido[1,2-a]pyrimidin-4-one
[1479] 2-(8-chloro-2-methylimidazo[1,2-a]pyridin-6-yl)-7-{(3S)-4-[2-(2-hydroxyethoxy)ethyl]-3-methylpiperazin-1-yl}-4H-pyrido[1,2-a]pyrimidin-4-one
[1480] 2-(8-chloro-2-methylimidazo[1,2-a]pyridin-6-yl)-7-[(3S)-4-cyclopropyl-3-methylpiperazin-1-yl]-4H-pyrido[1,2-a]pyrimidin-4-one
[1481] 2-(8-chloro-2-methylimidazo[1,2-a]pyridin-6-yl)-7-[(3S)-4-cyclobutyl-3-methylpiperazin-1-yl]-4H-pyrido[1,2-a]pyrimidin-4-one
[1482] 2-(8-chloro-2-methylimidazo[1,2-a]pyridin-6-yl)-7-[(3S)-4-(2-hydroxyethyl)-3-methylpiperazin-1-yl]-4H-pyrido[1,2-a]pyrimidin-4-one
[1483] 2-(8-fluoro-2-methylimidazo[1,2-a]pyridin-6-yl)-7-[(3S)-4-(2-methoxyethyl)-3-methylpiperazin-1-yl]-4H-pyrido[1,2-a]pyrimidin-4-one
[1484] 2-(8-fluoro-2-methylimidazo[1,2-a]pyridin-6-yl)-7-[(3S)-4-(2-hydroxyethyl)-3-methylpiperazin-1-yl]-4H-pyrido[1,2-a]pyrimidin-4-one
[1485] 2-(8-fluoro-2-methylimidazo[1,2-a]pyridin-6-yl)-7-{(3S)-4-[2-(2-hydroxyethoxy)ethyl]-3-methylpiperazin-1-yl}-4H-pyrido[1,2-a]pyrimidin-4-one
[1486] 2-(8-fluoro-2-methylimidazo[1,2-a]pyridin-6-yl)-7-[(3S)-3-methyl-4-(propan-2-yl)piperazin-1-yl]-4H-pyrido[1,2-a]pyrimidin-4-one
[1487] 7-[(3S)-4-cyclopropyl-3-methylpiperazin-1-yl]-2-(8-fluoro-2-methylimidazo[1,2-a]pyridin-6-yl)-4H-pyrido[1,2-a]pyrimidin-4-one
[1488] 7-[(3S)-4-cyclobutyl-3-methylpiperazin-1-yl]-2-(8-fluoro-2-methylimidazo[1,2-a]pyridin-6-yl)-4H-pyrido[1,2-a]pyrimidin-4-one
[1489] 7-(3,3-dimethylpiperazin-1-yl)-2-(4,6-dimethylpyrazolo[1,5-a]pyrazin-2-yl)-9-methyl-4H-pyrido[1,2-a]pyrimidin-4-one
[1490] 2-(1-methyl-1H-indazol-5-yl)-7-[(3R)-3-methylpiperazin-1-yl]-4H-pyrido[1,2-a]pyrimidin-4-one
[1491] 2-(4-ethyl-6-methylpyrazolo[1,5-a]pyrazin-2-yl)-7-(piperazin-1-yl)-4H-pyrido[1,2-a]pyrimidin-4-one
[1492] 2-(4-ethyl-6-methylpyrazolo[1,5-a]pyrazin-2-yl)-7-(4-methylpiperazin-1-yl)-4H-pyrido[1,2-a]pyrimidin-4-one
[1493] 2-(4-ethyl-6-methylpyrazolo[1,5-a]pyrazin-2-yl)-7-(4-ethylpiperazin-1-yl)-4H-pyrido[1,2-a]pyrimidin-4-one
[1494] 2-(4-ethyl-6-methylpyrazolo[1,5-a]pyrazin-2-yl)-7-[4-(2-hydroxyethyl)piperazin-1-yl]-4H-pyrido[1,2-a]pyrimidin-4-one
[1495] 7-[4-(dimethylamino)piperidin-1-yl]-2-(4-ethyl-6-methylpyrazolo[1,5-a]pyrazin-2-yl)-4H-pyrido[1,2-a]pyrimidin-4-one
[1496] 7-[4-(diethylamino)piperidin-1-yl]-2-(4-ethyl-6-methylpyrazolo[1,5-a]pyrazin-2-yl)-4H-pyrido[1,2-a]pyrimidin-4-one
[1497] 7-[(3R,5S)-3,5-dimethylpiperazin-1-yl]-2-(1-methyl-1H-indazol-5-yl)-4H-pyrido[1,2-a]pyrimidin-4-one
[1498] 2-(1-methyl-1H-indazol-5-yl)-7-[(3S)-3-methylpiperazin-1-yl]-4H-pyrido[1,2-a]pyrimidin-4-one
[1499] 2-(2-methylimidazo[1,2-a]pyridin-6-yl)-7-[1-(propan-2-yl)piperidin-4-yl]-4H-pyrido[1,2-a]pyrimidin-4-one
[1500] 2-(2-methylimidazo[1,2-a]pyridin-7-yl)-7-(piperazin-1-yl)-4H-pyrido[1,2-a]pyrimidin-4-one
[1501] 2-(2-methylimidazo[1,2-a]pyridin-7-yl)-7-(piperidin-4-yl)-4H-pyrido[1,2-a]pyrimidin-4-one
[1502] 2-(2-methylimidazo[1,2-a]pyridin-7-yl)-7-(4-methylpiperazin-1-yl)-4H-pyrido[1,2-a]pyrimidin-4-one
[1503] 7-(4-ethylpiperazin-1-yl)-2-(2-methylimidazo[1,2-a]pyridin-7-yl)-4H-pyrido[1,2-a]pyrimidin-4-one
[1504] 2-(2-methylimidazo[1,2-a]pyridin-7-yl)-7-(1-methylpiperidin-4-yl)-4H-pyrido[1,2-a]pyrimidin-4-one
[1505] 7-(1-ethylpiperidin-4-yl)-2-(2-methylimidazo[1,2-a]pyridin-7-yl)-4H-pyrido[1,2-a]pyrimidin-4-one
[1506] 2-(4,6-dimethylpyrazolo[1,5-a]pyrazin-2-yl)-9-methyl-7-[(3S)-3-methylpiperazin-1-yl]-4H-pyrido[1,2-a]pyrimidin-4-one
[1507] 7-[(3R,5S)-3,5-dimethylpiperazin-1-yl]-2-(4,6-dimethylpyrazolo[1,5-a]pyrazin-2-yl)-9-methyl-4H-pyrido[1,2-a]pyrimidin-4-one
[1508] 7-[(3S)-3,4-dimethylpiperazin-1-yl]-2-(4,6-dimethylpyrazolo[1,5-a]pyrazin-2-yl)-9-methyl-4H-pyrido[1,2-a]pyrimidin-4-one
[1509] 2-(4,6-dimethylpyrazolo[1,5-a]pyrazin-2-yl)-9-methyl-7-[(3R,5S)-3,4,5-trimethylpiperazin-1-yl]-4H-pyrido[1,2-a]pyrimidin-4-one
[1510] 2-(2-methylimidazo[1,2-a]pyridin-6-yl)-7-[1-(propan-2-yl)-1,2,3,6-tetrahydropyridin-4-yl]-4H-pyrido[1,2-a]pyrimidin-4-one
[1511] 2-(2-methyl-2H-indazol-5-yl)-7-(piperidin-4-yl)-4H-pyrazino[1,2-a]pyrimidin-4-one
[1512] 2-(2-methyl-2H-indazol-5-yl)-7-(1-methylpiperidin-4-yl)-4H-pyrazino[1,2-a]pyrimidin-4-one
[1513] 7-(1-ethylpiperidin-4-yl)-2-(2-methyl-2H-indazol-5-yl)-4H-pyrazino[1,2-a]pyrimidin-4-one
[1514] 7-[1-(2-hydroxyethyl)piperidin-4-yl]-2-(2-methyl-2H-indazol-5-yl)-4H-pyrazino[1,2-a]pyrimidin-4-one
[1515] 7-{4-[(dimethylamino)methyl]piperidin-1-yl}-2-(4,6-dimethylpyrazolo[1,5-a]pyrazin-2-yl)-4H-pyrido[1,2-a]pyrimidin-4-one
[1516] 2-(4,6-dimethylpyrazolo[1,5-a]pyrazin-2-yl)-7-[4-(pyrrolidin-1-ylmethyl)piperidin-1-yl]-4H-pyrido[1,2-a]pyrimidin-4-one
[1517] 2-(4,6-dimethylpyrazolo[1,5-a]pyrazin-2-yl)-7-[4-(piperidin-1-ylmethyl)piperidin-1-yl]-4H-pyrido[1,2-a]pyrimidin-4-one
[1518] 2-(3,4-dimethoxyphenyl)-7-{4-[(dimethylamino)methyl]piperidin-1-yl}-4H-pyrido[1,2-a]pyrimidin-4-one
[1519] 2-(3,4-dimethoxyphenyl)-7-[4-(pyrrolidin-1-ylmethyl)piperidin-1-yl]-4H-pyrido[1,2-a]pyrimidin-4-one
[1520] 2-(3,4-dimethoxyphenyl)-7-[4-(piperidin-1-yl methyl)piperidin-1-yl]-4H-pyrido[1,2-a]pyrimidin-4-one
[1521] 7-[1-(2-hydroxyethyl)piperidin-4-yl]-2-(2-methylimidazo[1,2-a]pyridin-6-yl)-4H-pyrido[1,2-a]pyrimidin-4-one
[1522] 7-[1-(2-hydroxyethyl)-1,2,3,6-tetrahydropyridin-4-yl]-2-(2-methylimidazo[1,2-a]pyridin-6-yl)-4H-pyrido[1,2-a]pyrimidin-4-one
[1523] 2-(2-methyl-2H-indazol-5-yl)-7-(1-methylpiperidin-4-yl)-4H-pyrido[1,2-a]pyrimidin-4-one
[1524] 2-(2-methylimidazo[1,2-a]pyridin-6-yl)-7-(1-methylpiperidin-4-yl)-4H-pyrazino[1,2-a]pyrimidin-4-one
[1525] 7-(1-ethylpiperidin-4-yl)-2-(2-methylimidazo[1,2-a]pyridin-6-yl)-4H-pyrazino[1,2-a]pyrimidin-4-one
[1526] 7-[1-(2-hydroxyethyl)piperidin-4-yl]-2-(2-methylimidazo[1,2-a]pyridin-6-yl)-4H-pyrazino[1,2-a]pyrimidin-4-one
[1527] 2-(4,6-dimethylpyrazolo[1,5-a]pyrazin-2-yl)-7-{4-[(2-hydroxyethyl)methyl)amino]piperidin-1-yl}-9-methyl-4H-pyrido[1,2-a]pyrimidin-4-one
[1528] 2-(4,6-dimethylpyrazolo[1,5-a]pyrazin-2-yl)-9-methyl-7-[4-(propylamino)piperidin-1-yl]-4H-pyrido[1,2-a]pyrimidin-4-one
[1529] 7-(4-amino-4-methylpiperidin-1-yl)-2-(4,6-dimethylpyrazolo[1,5-a]pyrazin-2-yl)-4H-pyrido[1,2-a]pyrimidin-4-one
[1530] 2-(2-methylimidazo[1,2-a]pyridin-6-yl)-7-(piperidin-4-yl)-4H-pyrazino[1,2-a]pyrimidin-4-one
[1531] 2-(2-methyl-2H-indazol-5-yl)-7-(piperazin-1-yl)-4H-pyrazino[1,2-a]pyrimidin-4-one
[1532] 2-(8-chloro-2-methylimidazo[1,2-a]pyridin-6-yl)-7-(piperidin-4-yl)-4H-pyrazino[1,2-a]pyrimidin-4-one
[1533] 2-(2,8-dimethylimidazo[1,2-a]pyridin-6-yl)-7-(piperidin-4-yl)-4H-pyrazino[1,2-a]pyrimidin-4-one
[1534] 2-(2-methyl-2H-indazol-5-yl)-7-(4-methylpiperazin-1-yl)-4H-pyrazino[1,2-a]pyrimidin-4-one
[1535] 7-(4-ethylpiperazin-1-yl)-2-(2-methyl-2H-indazol-5-yl)-4H-pyrazino[1,2-a]pyrimidin-4-one
[1536] 7-[4-(2-hydroxyethyl)piperazin-1-yl]-2-(2-methyl-2H-indazol-5-yl)-4H-pyrazino[1,2-a]pyrimidin-4-one
[1537] 2-(2,8-dimethylimidazo[1,2-a]pyridin-6-yl)-7-(1-methylpiperidin-4-yl)-4H-pyrazino[1,2-a]pyrimidin-4-one
[1538] 2-(2,8-dimethylimidazo[1,2-a]pyridin-6-yl)-7-(1-ethylpiperidin-4-yl)-4H-pyrazino[1,2-a]pyrimidin-4-one
[1539] 2-(2,8-dimethylimidazo[1,2-a]pyridin-6-yl)-7-[1-(2-hydroxyethyl)piperidin-4-yl]-4H-pyrazino[1,2-a]pyrimidin-4-one
[1540] 2-(8-chloro-2-methylimidazo[1,2-a]pyridin-6-yl)-7-[1-(propan-2-yl)piperidin-4-yl]-4H-pyrazino[1,2-a]pyrimidin-4-one
[1541] 2-(4,6-dimethylpyrazolo[1,5-a]pyrazin-2-yl)-7-[4-(ethylamino)piperidin-1-yl]-9-methyl-4H-pyrido[1,2-a]pyrimidin-4-one
[1542] 7-{4-[bis(2-hydroxyethyl)amino]piperidin-1-yl}-2-(4,6-dimethylpyrazolo[1,5-a]pyrazin-2-yl)-9-methyl-4H-pyrido[1,2-a]pyrimidin-4-one
[1543] 7-[1-(2-hydroxyethyl)piperidin-4-yl]-2-(2-methyl-1,3-benzoxazol-6-yl)-4H-pyrimido[1,2-b]pyridazin-4-one
[1544] 2-(8-chloro-2-methylimidazo[1,2-a]pyridin-6-yl)-7-[1-(2-hydroxyethyl)piperidin-4-yl]-4H-pyrazino[1,2-a]pyrimidin-4-one
[1545] 2-(4,6-dimethylpyrazolo[1,5-a]pyrazin-2-yl)-7-[1-(oxetan-3-yl)piperidin-4-yl]-4H-pyrido[1,2-a]pyrimidin-4-one
[1546] 2-(5,7-dimethylfuro[2,3-c]pyridin-2-yl)-7-(4-ethylpiperazin-1-yl)-4H-pyrido[1,2-a]pyrimidin-4-one
[1547] 2-(4,6-dimethylpyrazolo[1,5-a]pyrazin-2-yl)-7-(1-methyloctahydro-5H-pyrrolo[3,2-c]pyridin-5-yl)-4H-pyrido[1,2-a]pyrimidin-4-one
[1548] 2-(1-methyl-1H-indazol-5-yl)-7-(piperidin-4-yl)-4H-pyrido[1,2-a]pyrimidin-4-one
[1549] 7-(1-ethylpiperidin-4-yl)-2-(1-methyl-1H-indazol-5-yl)-4H-pyrido[1,2-a]pyrimidin-4-one
[1550] 7-[1-(2-hydroxyethyl)piperidin-4-yl]-2-(1-methyl-1H-indazol-5-yl)-4H-pyrido[1,2-a]pyrimidin-4-one
[1551] 2-(2-methyl-2H-indazol-5-yl)-7-(piperidin-4-yl)-4H-pyrido[1,2-a]pyrimidin-4-one
[1552] 2-(2,8-dimethylimidazo[1,2-a]pyridin-6-yl)-7-(piperidin-4-yl)-4H-pyrido[1,2-a]pyrimidin-4-one
[1553] 2-(2-methyl-2H-indazol-5-yl)-7-[1-(propan-2-yl)piperidin-4-yl]-4H-pyrido[1,2-a]pyrimidin-4-one
[1554] 2-(4,6-dimethylpyrazolo[1,5-a]pyrazin-2-yl)-7-{4-[(2-hydroxyethyl)amino]piperidin-1-yl}-9-methyl-4H-pyrido[1,2-a]pyrimidin-4-one
[1555] 2-(4,6-dimethylpyrazolo[1,5-a]pyrazin-2-yl)-9-methyl-7-[4-(methylamino)piperidin-1-yl]-4H-pyrido[1,2-a]pyrimidin-4-one
[1556] 2-(4,6-dimethylpyrazolo[1,5-a]pyrazin-2-yl)-9-methyl-7-[4-(propan-2-ylamino)piperidin-1-yl]-4H-pyrido[1,2-a]pyrimidin-4-one
[1557] 7-(1-ethylpiperidin-4-yl)-2-(2-methyl-2H-indazol-5-yl)-4H-pyrido[1,2-a]pyrimidin-4-one
[1558] 7-[1-(2-hydroxyethyl)piperidin-4-yl]-2-(2-methyl-2H-indazol-5-yl)-4H-pyrido[1,2-a]pyrimidin-4-one
[1559] 2-(2,8-dimethylimidazo[1,2-a]pyridin-6-yl)-7-(1-methylpiperidin-4-yl)-4H-pyrido[1,2-a]pyrimidin-4-one
[1560] 2-(2,8-dimethylimidazo[1,2-a]pyridin-6-yl)-7-(1-ethylpiperidin-4-yl)-4H-pyrido[1,2-a]pyrimidin-4-one
[1561] 2-(2,8-dimethylimidazo[1,2-a]pyridin-6-yl)-7-[1-(propan-2-yl)piperidin-4-yl]-4H-pyrido[1,2-a]pyrimidin-4-one
[1562] 2-(2,8-dimethylimidazo[1,2-a]pyridin-6-yl)-7-[1-(2-hydroxyethyl)piperidin-4-yl]-4H-pyrido[1,2-a]pyrimidin-4-one
[1563] 2-(4-ethyl-6-methylpyrazolo[1,5-a]pyrazin-2-yl)-7-(4-propylpiperazin-1-yl)-4H-pyrido[1,2-a]pyrimidin-4-one
[1564] 2-(4-ethyl-6-methylpyrazolo[1,5-a]pyrazin-2-yl)-7-[4-(propan-2-yl)piperazin-1-yl]-4H-pyrido[1,2-a]pyrimidin-4-one
[1565] 7-(4-cyclopropylpiperazin-1-yl)-2-(4-ethyl-6-methylpyrazolo[1,5-a]pyrazin-2-yl)-4H-pyrido[1,2-a]pyrimidin-4-one
[1566] 7-(4-cyclobutylpiperazin-1-yl)-2-(4-ethyl-6-methylpyrazolo[1,5-a]pyrazin-2-yl)-4H-pyrido[1,2-a]pyrimidin-4-one
[1567] 2-(4-ethyl-6-methylpyrazolo[1,5-a]pyrazin-2-yl)-7-[4-(oxetan-3-yl)piperazin-1-yl]-4H-pyrido[1,2-a]pyrimidin-4-one
[1568] 2-(4,6-dimethylpyrazolo[1,5-a]pyrazin-2-yl)-7-(1-ethyloctahydro-5H-pyrrolo[3,2-c]pyridin-5-yl)-4H-pyrido[1,2-a]pyrimidin-4-one
[1569] 2-(4,6-dimethylpyrazolo[1,5-a]pyrazin-2-yl)-7-[1-(2-hydroxyethyl)octahydro-5H-pyrrolo[3,2-c]pyridin-5-yl]-4H-pyrido[1,2-a]pyrimidin-4-one
[1570] 2-(4-methoxy-6-methylpyrazolo[1,5-a]pyrazin-2-yl)-7-(4-methylpiperazin-1-yl)-4H-pyrido[1,2-a]pyrimidin-4-one
[1571] 2-(4-hydroxy-6-methylpyrazolo[1,5-a]pyrazin-2-yl)-7-(4-methylpiperazin-1-yl)-4H-pyrido[1,2-a]pyrimidin-4-one
[1572] 2-(2-methylimidazo[1,2-a]pyridin-6-yl)-7-[1-(propan-2-yl)piperidin-4-yl]-4H-pyrazino[1,2-a]pyrimidin-4-one
[1573] 7-(1-cyclobutylpiperidin-4-yl)-2-(2-methylimidazo[1,2-a]pyridin-6-yl)-4H-pyrazino[1,2-a]pyrimidin-4-one
[1574] 7-[(3R)-3,4-dimethylpiperazin-1-yl]-2-(4-ethyl-6-methylpyrazolo[1,5-a]pyrazin-2-yl)-4H-pyrido[1,2-a]pyrimidin-4-one
[1575] 7-[(3R)-4-ethyl-3-methylpiperazin-1-yl]-2-(4-ethyl-6-methylpyrazolo[1,5-a]pyrazin-2-yl)-4H-pyrido[1,2-a]pyrimidin-4-one
[1576] 2-(4-ethyl-6-methylpyrazolo[1,5-a]pyrazin-2-yl)-7-[(3R)-3-methyl-4-propylpiperazin-1-yl]-4H-pyrido[1,2-a]pyrimidin-4-one
[1577] 2-(4-ethyl-6-methylpyrazolo[1,5-a]pyrazin-2-yl)-7-[(3R)-4-(2-hydroxyethyl)-3-methylpiperazin-1-yl]-4H-pyrido[1,2-a]pyrimidin-4-one
[1578] 7-[(3R,5S)-3,5-dimethylpiperazin-1-yl]-2-(4-ethyl-6-methylpyrazolo[1,5-a]pyrazin-2-yl)-4H-pyrido[1,2-a]pyrimidin-4-one
[1579] 2-(4-ethyl-6-methylpyrazolo[1,5-a]pyrazin-2-yl)-7-[4-(pyrrolidin-1-yl)piperidin-1-yl]-4H-pyrido[1,2-a]pyrimidin-4-one
[1580] 2-(4-ethyl-6-methylpyrazolo[1,5-a]pyrazin-2-yl)-7-[(3S)-3-methylpiperazin-1-yl]-4H-pyrido[1,2-a]pyrimidin-4-one
[1581] 2-(4-ethyl-6-methylpyrazolo[1,5-a]pyrazin-2-yl)-7-(4-methyl-1,4-diazepan-1-yl)-4H-pyrido[1,2-a]pyrimidin-4-one
[1582] 2-(8-ethyl-2-methylimidazo[1,2-a]pyridin-6-yl)-7-(piperazin-1-yl)-4H-pyrido[1,2-a]pyrimidin-4-one
[1583] 2-(8-ethyl-2-methylimidazo[1,2-a]pyridin-6-yl)-7-[(3R)-3-methylpiperazin-1-yl]-4H-pyrido[1,2-a]pyrimidin-4-one
[1584] 2-(8-ethyl-2-methylimidazo[1,2-a]pyridin-6-yl)-7-[(3S)-3-methylpiperazin-1-yl]-4H-pyrido[1,2-a]pyrimidin-4-one
[1585] 2-(4,6-dimethylpyrazolo[1,5-a]pyrazin-2-yl)-7-[1-(propan-2-yl)piperidin-4-yl]-4H-pyrido[1,2-a]pyrimidin-4-one
[1586] 7-(1-cyclopropylpiperidin-4-yl)-2-(4,6-dimethylpyrazolo[1,5-a]pyrazin-2-yl)-4H-pyrido[1,2-a]pyrimidin-4-one
[1587] 7-(1-cyclobutylpiperidin-4-yl)-2-(4,6-dimethylpyrazolo[1,5-a]pyrazin-2-yl)-4H-pyrido[1,2-a]pyrimidin-4-one
[1588] 2-(4-ethyl-6-methylpyrazolo[1,5-a]pyrazin-2-yl)-7-[(3R)-3-methyl-4-(propan-2-yl)piperazin-1-yl]-4H-pyrido[1,2-a]pyrimidin-4-one
[1589] 7-[(3R)-4-cyclopropyl-3-methylpiperazin-1-yl]-2-(4-ethyl-6-methylpyrazolo[1,5-a]pyrazin-2-yl)-4H-pyrido[1,2-a]pyrimidin-4-one
[1590] 7-[(3R)-4-cyclobutyl-3-methylpiperazin-1-yl]-2-(4-ethyl-6-methylpyrazolo[1,5-a]pyrazin-2-yl)-4H-pyrido[1,2-a]pyrimidin-4-one
[1591] 2-(4-ethyl-6-methylpyrazolo[1,5-a]pyrazin-2-yl)-7-[(3R)-3-methyl-4-(oxetan-3-yl)piperazin-1-yl]-4H-pyrido[1,2-a]pyrimidin-4-one
[1592] 2-(8-ethyl-2-methylimidazo[1,2-a]pyridin-6-yl)-7-[4-(2-hydroxyethyl)piperazin-1-yl]-4H-pyrido[1,2-a]pyrimidin-4-one
[1593] 7-(4-cyclobutylpiperazin-1-yl)-2-(8-ethyl-2-methylimidazo[1,2-a]pyridin-6-yl)-4H-pyrido[1,2-a]pyrimidin-4-one
[1594] 2-(8-ethyl-2-methylimidazo[1,2-a]pyridin-6-yl)-7-[(3R)-4-(2-hydroxyethyl)-3-methylpiperazin-1-yl]-4H-pyrido[1,2-a]pyrimidin-4-one
[1595] 7-[(3R)-4-cyclobutyl-3-methylpiperazin-1-yl]-2-(8-ethyl-2-methylimidazo[1,2-a]pyridin-6-yl)-4H-pyrido[1,2-a]pyrimidin-4-one
[1596] 2-(8-ethyl-2-methylimidazo[1,2-a]pyridin-6-yl)-7-[(3S)-4-(2-hydroxyethyl)-3-methylpiperazin-1-yl]-4H-pyrido[1,2-a]pyrimidin-4-one
[1597] 7-[(3S)-4-cyclobutyl-3-methylpiperazin-1-yl]-2-(8-ethyl-2-methylimidazo[1,2-a]pyridin-6-yl)-4H-pyrido[1,2-a]pyrimidin-4-one
[1598] 2-(4-ethyl-6-methylpyrazolo[1,5-a]pyrazin-2-yl)-7-(piperidin-4-yl)-4H-pyrazino[1,2-a]pyrimidin-4-one
[1599] 2-(4-ethyl-6-methylpyrazolo[1,5-a]pyrazin-2-yl)-7-(1-methylpiperidin-4-yl)-4H-pyrazino[1,2-a]pyrimidin-4-one
[1600] 2-(4-ethyl-6-methylpyrazolo[1,5-a]pyrazin-2-yl)-7-(1-ethylpiperidin-4-yl)-4H-pyrazino[1,2-a]pyrimidin-4-one
[1601] 2-(4-ethyl-6-methylpyrazolo[1,5-a]pyrazin-2-yl)-7-(piperidin-4-yl)-4H-pyrido[1,2-a]pyrimidin-4-one
[1602] 2-(4-ethyl-6-methylpyrazolo[1,5-a]pyrazin-2-yl)-7-(1-methylpiperidin-4-yl)-4H-pyrido[1,2-a]pyrimidin-4-one
[1603] 2-(4-ethyl-6-methylpyrazolo[1,5-a]pyrazin-2-yl)-7-(1-ethylpiperidin-4-yl)-4H-pyrido[1,2-a]pyrimidin-4-one
[1604] 2-(4-ethyl-6-methylpyrazolo[1,5-a]pyrazin-2-yl)-7-[1-(2-hydroxyethyl)piperidin-4-yl]-4H-pyrido[1,2-a]pyrimidin-4-one
[1605] 2-(4-ethyl-6-methylpyrazolo[1,5-a]pyrazin-2-yl)-7-(1-propylpiperidin-4-yl)-4H-pyrido[1,2-a]pyrimidin-4-one
[1606] 2-(4-ethyl-6-methylpyrazolo[1,5-a]pyrazin-2-yl)-7-[(3R)-3-methylpiperazin-1-yl]-4H-pyrido[1,2-a]pyrimidin-4-one
[1607] 2-(4,6-dimethylpyrazolo[1,5-a]pyrazin-2-yl)-7-[1-(2-fluoroethyl)piperidin-4-yl]-4H-pyrido[1,2-a]pyrimidin-4-one
[1608] 2-(4,6-dimethylpyrazolo[1,5-a]pyrazin-2-yl)-7-[1-(3-fluoropropyl)piperidin-4-yl]-4H-pyrido[1,2-a]pyrimidin-4-one
[1609] 2-(4-ethyl-6-methylpyrazolo[1,5-a]pyrazin-2-yl)-7-[4-(2-fluoroethyl)piperazin-1-yl]-4H-pyrido[1,2-a]pyrimidin-4-one
[1610] 2-(4-ethyl-6-methylpyrazolo[1,5-a]pyrazin-2-yl)-7-[4-(3-fluoropropyl)piperazin-1-yl]-4H-pyrido[1,2-a]pyrimidin-4-one
[1611] 2-(4-ethyl-6-methylpyrazolo[1,5-a]pyrazin-2-yl)-7-[(3R)-4-(2-fluoroethyl)-3-methylpiperazin-1-yl]-4H-pyrido[1,2-a]pyrimidin-4-one
[1612] 2-(4-ethyl-6-methylpyrazolo[1,5-a]pyrazin-2-yl)-7-[(3R)-4-(3-fluoropropyl)-3-methylpiperazin-1-yl]-4H-pyrido[1,2-a]pyrimidin-4-one
[1613] 2-(4-ethyl-6-methylpyrazolo[1,5-a]pyrazin-2-yl)-7-[1-(2-fluoroethyl)piperidin-4-yl]-4H-pyrido[1,2-a]pyrimidin-4-one
[1614] 2-(4-ethyl-6-methylpyrazolo[1,5-a]pyrazin-2-yl)-7-[1-(3-fluoropropyl)piperidin-4-yl]-4H-pyrido[1,2-a]pyrimidin-4-one
[1615] 2-(4,6-dimethylpyrazolo[1,5-a]pyrazin-2-yl)-7-{(3R)-4-[2-(2-hydroxyethoxy)ethyl]-3-methylpiperazin-1-yl}-9-methyl-4H-pyrido[1,2-a]pyrimidin-4-one
[1616] 2-(4,6-dimethylpyrazolo[1,5-a]pyrazin-2-yl)-9-methyl-7-(piperidin-4-yl)-4H-pyrido[1,2-a]pyrimidin-4-one
[1617] 2-(4,6-dimethylpyrazolo[1,5-a]pyrazin-2-yl)-9-methyl-7-(1-methylpiperidin-4-yl)-4H-pyrido[1,2-a]pyrimidin-4-one
[1618] 2-(4,6-dimethylpyrazolo[1,5-a]pyrazin-2-yl)-7-[(3R)-4-(2-hydroxyethyl)-3-methylpiperazin-1-yl]-9-methyl-4H-pyrido[1,2-a]pyrimidin-4-one
[1619] 2-[8-(hydroxymethyl)-2-methylimidazo[1,2-a]pyridin-6-yl]-7-(piperazin-1-yl)-4H-pyrido[1,2-a]pyrimidin-4-one
[1620] 7-[(3R,5S)-3,5-dimethylpiperazin-1-yl]-2-(8-ethyl-2-methylimidazo[1,2-a]pyridin-6-yl)-4H-pyrido[1,2-a]pyrimidin-4-one
[1621] 2-(8-ethyl-2-methylimidazo[1,2-a]pyridin-6-yl)-7-(4-methyl-1,4-diazepan-1-yl)-4H-pyrido[1,2-a]pyrimidin-4-one
[1622] 2-[8-(hydroxymethyl)-2-methylimidazo[1,2-a]pyridin-6-yl]-7-(4-methylpiperazin-1-yl)-4H-pyrido[1,2-a]pyrimidin-4-one
[1623] 7-(4-ethylpiperazin-1-yl)-2-[8-(hydroxymethyl)-2-methylimidazo[1,2-a]pyridin-6-yl]-4H-pyrido[1,2-a]pyrimidin-4-one
[1624] 2-(4-ethyl-6-methylpyrazolo[1,5-a]pyrazin-2-yl)-7-[1-(propan-2-yl)piperidin-4-yl]-4H-pyrido[1,2-a]pyrimidin-4-one
[1625] 7-(1-cyclopropylpiperidin-4-yl)-2-(4-ethyl-6-methylpyrazolo[1,5-a]pyrazin-2-yl)-4H-pyrido[1,2-a]pyrimidin-4-one
[1626] 7-(1-cyclobutylpiperidin-4-yl)-2-(4-ethyl-6-methylpyrazolo[1,5-a]pyrazin-2-yl)-4H-pyrido[1,2-a]pyrimidin-4-one
[1627] 2-(4-ethyl-6-methylpyrazolo[1,5-a]pyrazin-2-yl)-7-[1-(oxetan-3-yl)piperidin-4-yl]-4H-pyrido[1,2-a]pyrimidin-4-one
[1628] 2-(4-cyclopropyl-6-methylpyrazolo[1,5-a]pyrazin-2-yl)-7-(piperazin-1-yl)-4H-pyrido[1,2-a]pyrimidin-4-one
[1629] 2-(4-cyclopropyl-6-methylpyrazolo[1,5-a]pyrazin-2-yl)-7-(4-methylpiperazin-1-yl)-4H-pyrido[1,2-a]pyrimidin-4-one
[1630] 2-(4-cyclopropyl-6-methylpyrazolo[1,5-a]pyrazin-2-yl)-7-(4-ethylpiperazin-1-yl)-4H-pyrido[1,2-a]pyrimidin-4-one
[1631] 2-(4-cyclopropyl-6-methylpyrazolo[1,5-a]pyrazin-2-yl)-7-[4-(2-hydroxyethyl)piperazin-1-yl]-4H-pyrido[1,2-a]pyrimidin-4-one
[1632] 2-(4,6-dimethylpyrazolo[1,5-a]pyrazin-2-yl)-7-(1-propylpiperidin-4-yl)-4H-pyrido[1,2-a]pyrimidin-4-one
[1633] 2-[4-(dimethylamino)-6-methylpyrazolo[1,5-a]pyrazin-2-yl]-7-(piperazin-1-yl)-4H-pyrido[1,2-a]pyrimidin-4-one
[1634] 2-(2-methyl-1H-benzimidazol-6-yl)-7-(4-methylpiperazin-1-yl)-4H-pyrido[1,2-a]pyrimidin-4-one
[1635] 7-(4-ethylpiperazin-1-yl)-2-(2-methyl-1H-benzimidazol-6-yl)-4H-pyrido[1,2-a]pyrimidin-4-one
[1636] 2-(2,8-dimethylimidazo[1,2-a]pyridin-6-yl)-7-(piperidin-4-yl)-4H-pyrimido[1,2-b]pyridazin-4-one
[1637] 2-(2-methylimidazo[1,2-a]pyridin-6-yl)-7-(piperidin-4-yl)-4H-pyrimido[1,2-b]pyridazin-4-one
[1638] 7-[1-(2,2-dimethyl-1,3-dioxan-5-yl)piperidin-4-yl]-2-(4-ethyl-6-methylpyrazolo[1,5-a]pyrazin-2-yl)-4H-pyrido[1,2-a]pyrimidin-4-one
[1639] 7-[1-(1,3-dihydroxypropan-2-yl)piperidin-4-yl]-2-(4-ethyl-6-methylpyrazolo[1,5-a]pyrazin-2-yl)-4H-pyrido[1,2-a]pyrimidin-4-one
[1640] 7-[(3R,5S)-3,5-dimethylpiperazin-1-yl]-2-(1,3-dimethylpyrrolo[1,2-a]pyrazin-7-yl)-4H-pyrido[1,2-a]pyrimidin-4-one
[1641] 2-(8-ethyl-2-methylimidazo[1,2-a]pyridin-6-yl)-7-(piperidin-4-yl)-4H-pyrido[1,2-a]pyrimidin-4-one
[1642] 2-(8-ethyl-2-methylimidazo[1,2-a]pyridin-6-yl)-7-(1-methylpiperidin-4-yl)-4H-pyrido[1,2-a]pyrimidin-4-one
[1643] 2-(8-ethyl-2-methylimidazo[1,2-a]pyridin-6-yl)-7-(1-ethylpiperidin-4-yl)-4H-pyrido[1,2-a]pyrimidin-4-one
[1644] 2-(8-ethyl-2-methylimidazo[1,2-a]pyridin-6-yl)-7-[1-(2-hydroxyethyl)piperidin-4-yl]-4H-pyrido[1,2-a]pyrimidin-4-one
[1645] 7-[(3R)-3,4-dimethylpiperazin-1-yl]-2-(8-ethyl-2-methylimidazo[1,2-a]pyridin-6-yl)-4H-pyrido[1,2-a]pyrimidin-4-one
[1646] 2-(8-ethyl-2-methylimidazo[1,2-a]pyridin-6-yl)-7-[(3R)-4-ethyl-3-methylpiperazin-1-yl]-4H-pyrido[1,2-a]pyrimidin-4-one
[1647] 2-(4,6-dimethylpyrazolo[1,5-a]pyrazin-2-yl)-7-(1-ethylpiperidin-4-yl)-9-methyl-4H-pyrido[1,2-a]pyrimidin-4-one
[1648] 2-(4,6-dimethylpyrazolo[1,5-a]pyrazin-2-yl)-7-[1-(2-hydroxyethyl)piperidin-4-yl]-9-methyl-4H-pyrido[1,2-a]pyrimidin-4-one
[1649] 7-(1-cyclobutylpiperidin-4-yl)-2-(4,6-dimethylpyrazolo[1,5-a]pyrazin-2-yl)-9-methyl-4H-pyrido[1,2-a]pyrimidin-4-one
[1650] 9-methyl-2-(2-methyl-2H-indazol-5-yl)-7-(1-methylpiperidin-4-yl)-4H-pyrido[1,2-a]pyrimidin-4-one
[1651] 7-[4-(dimethylamino)-4-methylpiperidin-1-yl]-2-(4,6-dimethylpyrazolo[1,5-a]pyrazin-2-yl)-4H-pyrido[1,2-a]pyrimidin-4-one
[1652] 2-(4,6-dimethylpyrazolo[1,5-a]pyrazin-2-yl)-7-[4-(ethylamino)-4-methylpiperidin-1-yl]-4H-pyrido[1,2-a]pyrimidin-4-one
[1653] 2-(4,6-dimethylpyrazolo[1,5-a]pyrazin-2-yl)-7-[4-methyl-4-(propylamino)piperidin-1-yl]-4H-pyrido[1,2-a]pyrimidin-4-one
[1654] 2-(4,6-dimethylpyrazolo[1,5-a]pyrazin-2-yl)-7-{4-[(2-hydroxyethyl)amino]-4-methylpiperidin-1-yl}-4H-pyrido[1,2-a]pyrimidin-4-one
[1655] 7-(1-cyclobutylpiperidin-4-yl)-9-methyl-2-(2-methyl-2H-indazol-5-yl)-4H-pyrido[1,2-a]pyrimidin-4-one
[1656] 7-[1-(2-hydroxyethyl)piperidin-4-yl]-9-methyl-2-(2-methyl-2H-indazol-5-yl)-4H-pyrido[1,2-a]pyrimidin-4-one
[1657] 2-(4,6-dimethylpyrazolo[1,5-a]pyrazin-2-yl)-9-methyl-7-(1-propylpiperidin-4-yl)-4H-pyrido[1,2-a]pyrimidin-4-one
[1658] 2-(1,3-dimethylpyrrolo[1,2-a]pyrazin-7-yl)-7-[(3R)-3-methylpiperazin-1-yl]-4H-pyrido[1,2-a]pyrimidin-4-one
[1659] 2-(8-cyclopropyl-2-methylimidazo[1,2-a]pyridin-6-yl)-7-(piperazin-1-yl)-4H-pyrido[1,2-a]pyrimidin-4-one
[1660] 2-(8-cyclopropyl-2-methylimidazo[1,2-a]pyridin-6-yl)-7-[(3R)-3-methylpiperazin-1-yl]-4H-pyrido[1,2-a]pyrimidin-4-one
[1661] 2-(8-cyclopropyl-2-methylimidazo[1,2-a]pyridin-6-yl)-7-[(3S)-3-methylpiperazin-1-yl]-4H-pyrido[1,2-a]pyrimidin-4-one
[1662] 2-(8-cyclopropyl-2-methylimidazo[1,2-a]pyridin-6-yl)-7-[(3R,5S)-3,5-dimethylpiperazin-1-yl]-4H-pyrido[1,2-a]pyrimidin-4-one
[1663] 7-(1-cyclopropylpiperidin-4-yl)-9-methyl-2-(2-methyl-2H-indazol-5-yl)-4H-pyrido[1,2-a]pyrimidin-4-one
[1664] 7-(1-ethylpiperidin-4-yl)-9-methyl-2-(2-methyl-2H-indazol-5-yl)-4H-pyrido[1,2-a]pyrimidin-4-one
[1665] 2-(4,6-dimethylpyrazolo[1,5-a]pyrazin-2-yl)-9-methyl-7-(piperazin-1-yl)-4H-pyrido[1,2-a]pyrimidin-4-one
[1666] 9-methyl-2-(2-methyl-2H-indazol-5-yl)-7-(piperidin-4-yl)-4H-pyrido[1,2-a]pyrimidin-4-one
[1667] 2-(4,6-dimethylpyrazolo[1,5-a]pyrazin-2-yl)-7-[(1-methylpiperidin-4-yl)oxy]-4H-pyrido[1,2-a]pyrimidin-4-one
[1668] 2-(6-methyl-4-propylpyrazolo[1,5-a]pyrazin-2-yl)-7-(piperazin-1-yl)-4H-pyrido[1,2-a]pyrimidin-4-one
[1669] 7-(4-methylpiperazin-1-yl)-2-(6-methyl-4-propylpyrazolo[1,5-a]pyrazin-2-yl)-4H-pyrido[1,2-a]pyrimidin-4-one
[1670] 7-(4-ethylpiperazin-1-yl)-2-(6-methyl-4-propylpyrazolo[1,5-a]pyrazin-2-yl)-4H-pyrido[1,2-a]pyrimidin-4-one
[1671] 7-[4-(2-hydroxyethyl)piperazin-1-yl]-2-(6-methyl-4-propylpyrazolo[1,5-a]pyrazin-2-yl)-4H-pyrido[1,2-a]pyrimidin-4-one
[1672] 7-[(3R)-3-methylpiperazin-1-yl]-2-(6-methyl-4-propylpyrazolo[1,5-a]pyrazin-2-yl)-4H-pyrido[1,2-a]pyrimidin-4-one
[1673] 7-[(3S)-3-methylpiperazin-1-yl]-2-(6-methyl-4-propylpyrazolo[1,5-a]pyrazin-2-yl)-4H-pyrido[1,2-a]pyrimidin-4-one
[1674] 7-[(3R,5S)-3,5-dimethylpiperazin-1-yl]-2-(6-methyl-4-propylpyrazolo[1,5-a]pyrazin-2-yl)-4H-pyrido[1,2-a]pyrimidin-4-one
[1675] 2-(1,3-dimethylpyrrolo[1,2-a]pyrazin-7-yl)-7-[(3R)-3-methyl-4-(propan-2-yl)piperazin-1-yl]-4H-pyrido[1,2-a]pyrimidin-4-one
[1676] 7-(4-amino-4-methylpiperidin-1-yl)-2-(1,3-dimethylpyrrolo[1,2-a]pyrazin-7-yl)-4H-pyrido[1,2-a]pyrimidin-4-one
[1677] 2-(4,6-dimethylpyrazolo[1,5-a]pyrazin-2-yl)-7-[(3S)-3-ethylpiperazin-1-yl]-9-methyl-4H-pyrido[1,2-a]pyrimidin-4-one
[1678] 2-[2-methyl-8-(trifluoromethyl)imidazo[1,2-a]pyridin-6-yl]-7-(piperazin-1-yl)-4H-pyrido[1,2-a]pyrimidin-4-one
[1679] 7-[(3R)-3-methylpiperazin-1-yl]-2-[2-methyl-8-(trifluoromethyl)imidazo[1,2-a]pyridin-6-yl]-4H-pyrido[1,2-a]pyrimidin-4-one
[1680] 7-[(3S)-3-methylpiperazin-1-yl]-2-[2-methyl-8-(trifluoromethyl)imidazo[1,2-a]pyridin-6-yl]-4H-pyrido[1,2-a]pyrimidin-4-one
[1681] 7-[(3R,5S)-3,5-dimethylpiperazin-1-yl]-2-[2-methyl-8-(trifluoromethyl)imidazo[1,2-a]pyridin-6-yl]-4H-pyrido[1,2-a]pyrimidin-4-one
[1682] 7-(4-amino-4-methylpiperidin-1-yl)-2-(4-ethyl-6-methylpyrazolo[1,5-a]pyrazin-2-yl)-4H-pyrido[1,2-a]pyrimidin-4-one
[1683] 2-(2,7-dimethyl-2H-indazol-5-yl)-7-(piperazin-1-yl)-4H-pyrido[1,2-a]pyrimidin-4-one
[1684] 2-(2,7-dimethyl-2H-indazol-5-yl)-7-(piperidin-4-yl)-4H-pyrido[1,2-a]pyrimidin-4-one
[1685] 7-(3-aminoprop-1-yn-1-yl)-2-(4,6-dimethylpyrazolo[1,5-a]pyrazin-2-yl)-4H-pyrido[1,2-a]pyrimidin-4-one
[1686] 2-(2,7-dimethyl-2H-indazol-5-yl)-7-[(3R)-3-methylpiperazin-1-yl]-4H-pyrido[1,2-a]pyrimidin-4-one
[1687] 7-(3-aminopropyl)-2-(4,6-dimethylpyrazolo[1,5-a]pyrazin-2-yl)-4H-pyrido[1,2-a]pyrimidin-4-one
[1688] 2-(1,3-dimethylpyrrolo[1,2-a]pyrazin-7-yl)-7-(1,2,3,6-tetrahydropyridin-4-yl)-4H-pyrido[1,2-a]pyrimidin-4-one
[1689] 2-(4,6-dimethylpyrazolo[1,5-a]pyrazin-2-yl)-7-(2,2,6,6-tetramethyl-1,2,3,6-tetrahydropyridin-4-yl)-4H-pyrido[1,2-a]pyrimidin-4-one
[1690] 2-(4-ethyl-6-methylpyrazolo[1,5-a]pyrazin-2-yl)-7-(2,2,6,6-tetramethyl-1,2,3,6-tetrahydropyridin-4-yl)-4H-pyrido[1,2-a]pyrimidin-4-one
[1691] 2-(4,6-dimethylpyrazolo[1,5-a]pyrazin-2-yl)-7-[(3aR,6aS)-hexahydropyrrolo[3,4-c]pyrrol-2(1H)-yl]-4H-pyrido[1,2-a]pyrimidin-4-one
[1692] 2-(4-ethyl-6-methylpyrazolo[1,5-a]pyrazin-2-yl)-7-[(3aR,6aS)-hexahydropyrrolo[3,4-c]pyrrol-2(1H)-yl]-4H-pyrido[1,2-a]pyrimidin-4-one
[1693] 7-[(3R,5S)-3,5-dimethylpiperazin-1-yl]-2-(1-ethyl-3-methylpyrrolo[1,2-a]pyrazin-7-yl)-4H-pyrido[1,2-a]pyrimidin-4-one
[1694] 7-(1,4-diazepan-1-yl)-2-(1-ethyl-3-methylpyrrolo[1,2-a]pyrazin-7-yl)-4H-pyrido[1,2-a]pyrimidin-4-one
[1695] 2-(2,7-dimethyl-2H-indazol-5-yl)-7-[(3S)-3-methylpiperazin-1-yl]-4H-pyrido[1,2-a]pyrimidin-4-one
[1696] 2-(2,7-dimethyl-2H-indazol-5-yl)-7-[(3S)-3,4-dimethylpiperazin-1-yl]-4H-pyrido[1,2-a]pyrimidin-4-one
[1697] 2-(2,7-dimethyl-2H-indazol-5-yl)-7-(1-methylpiperidin-4-yl)-4H-pyrido[1,2-a]pyrimidin-4-one
[1698] 2-(2,7-dimethyl-2H-indazol-5-yl)-7-(1-ethylpiperidin-4-yl)-4H-pyrido[1,2-a]pyrimidin-4-one
[1699] 9-methyl-2-(2-methyl-2H-indazol-5-yl)-7-(piperazin-1-yl)-4H-pyrido[1,2-a]pyrimidin-4-one
[1700] 9-methyl-2-(2-methyl-2H-indazol-5-yl)-7-[(3R)-3-methylpiperazin-1-yl]-4H-pyrido[1,2-a]pyrimidin-4-one
[1701] 9-methyl-2-(2-methyl-2H-indazol-5-yl)-7-[(3S)-3-methylpiperazin-1-yl]-4H-pyrido[1,2-a]pyrimidin-4-one
[1702] 7-[3-(dimethylamino)azetidin-1-yl]-2-(4,6-dimethylpyrazolo[1,5-a]pyrazin-2-yl)-4H-pyrido[1,2-a]pyrimidin-4-one
[1703] 7-[3-(diethylamino)azetidin-1-yl]-2-(4,6-dimethylpyrazolo[1,5-a]pyrazin-2-yl)-4H-pyrido[1,2-a]pyrimidin-4-one
[1704] 2-(4,6-dimethylpyrazolo[1,5-a]pyrazin-2-yl)-7-[3-(pyrrolidin-1-yl)azetidin-1-yl]-4H-pyrido[1,2-a]pyrimidin-4-one
[1705] 7-(1,4-diazepan-1-yl)-2-(4-ethyl-6-methylpyrazolo[1,5-a]pyrazin-2-yl)-4H-pyrido[1,2-a]pyrimidin-4-one
[1706] 7-[(3aR,6aS)-hexahydropyrrolo[3,4-c]pyrrol-2(1H)-yl]-2-(6-methyl-4-propylpyrazolo[1,5-a]pyrazin-2-yl)-4H-pyrido[1,2-a]pyrimidin-4-one
[1707] 2-(6-methyl-4-propylpyrazolo[1,5-a]pyrazin-2-yl)-7-(1,2,3,6-tetrahydropyridin-4-yl)-4H-pyrido[1,2-a]pyrimidin-4-one
[1708] 2-(4-ethyl-6-methylpyrazolo[1,5-a]pyrazin-2-yl)-7-(1,2,3,6-tetrahydropyridin-4-yl)-4H-pyrido[1,2-a]pyrimidin-4-one
[1709] 7-[(3S)-3-(aminomethyl)pyrrolidin-1-yl]-2-(4,6-dimethylpyrazolo[1,5-a]pyrazin-2-yl)-4H-pyrido[1,2-a]pyrimidin-4-one
[1710] 2-(4,6-dimethylpyrazolo[1,5-a]pyrazin-2-yl)-7-[3-(piperidin-1-yl)azetidin-1-yl]-4H-pyrido[1,2-a]pyrimidin-4-one
[1711] 2-(6-methyl-4-propylpyrazolo[1,5-a]pyrazin-2-yl)-7-(piperidin-4-yl)-4H-pyrido[1,2-a]pyrimidin-4-one
[1712] 7-(2,7-diazaspiro[4.4]non-2-yl)-2-(4,6-dimethylpyrazolo[1,5-a]pyrazin-2-yl)-4H-pyrido[1,2-a]pyrimidin-4-one
[1713] 2-(2,7-dimethyl-2H-indazol-5-yl)-7-(4-methylpiperazin-1-yl)-4H-pyrido[1,2-a]pyrimidin-4-one
[1714] 7-[3-(dimethylamino)propyl]-2-(4,6-dimethylpyrazolo[1,5-a]pyrazin-2-yl)-4H-pyrido[1,2-a]pyrimidin-4-one
[1715] 7-{(3S)-3-[(dimethylamino)methyl]pyrrolidin-1-yl}-2-(4,6-dimethylpyrazolo[1,5-a]pyrazin-2-yl)-4H-pyrido[1,2-a]pyrimidin-4-one
[1716] 2-(4-ethyl-6-methylpyrazolo[1,5-a]pyrazin-2-yl)-9-methyl-7-(piperidin-4-yl)-4H-pyrido[1,2-a]pyrimidin-4-one
[1717] 9-methyl-2-(1-methyl-1H-indazol-5-yl)-7-(piperidin-4-yl)-4H-pyrido[1,2-a]pyrimidin-4-one
[1718] 2-(4-ethyl-6-methylpyrazolo[1,5-a]pyrazin-2-yl)-9-methyl-7-(1,2,3,6-tetrahydropyridin-4-yl)-4H-pyrido[1,2-a]pyrimidin-4-one
[1719] 2-(4-ethyl-6-methylpyrazolo[1,5-a]pyrazin-2-yl)-9-methyl-7-(1-methylpiperidin-4-yl)-4H-pyrido[1,2-a]pyrimidin-4-one
[1720] 2-(1,7-dimethyl-1H-indazol-5-yl)-7-(piperidin-4-yl)-4H-pyrido[1,2-a]pyrimidin-4-one
[1721] 2-(1,7-dimethyl-1H-indazol-5-yl)-7-(piperazin-1-yl)-4H-pyrido[1,2-a]pyrimidin-4-one
[1722] 2-(1,7-dimethyl-1H-indazol-5-yl)-7-[(3S)-3-methylpiperazin-1-yl]-4H-pyrido[1,2-a]pyrimidin-4-one
[1723] 7-{(3S)-3-[(diethylamino)methyl]pyrrolidin-1-yl}-2-(4,6-dimethylpyrazolo[1,5-a]pyrazin-2-yl)-4H-pyrido[1,2-a]pyrimidin-4-one
[1724] 2-(4,6-dimethylpyrazolo[1,5-a]pyrazin-2-yl)-7-{(3S)-3-[(ethylamino)methyl]pyrrolidin-1-yl}-4H-pyrido[1,2-a]pyrimidin-4-one
[1725] 7-{3-[(dimethylamino)methyl]azetidin-1-yl}-2-(4,6-dimethylpyrazolo[1,5-a]pyrazin-2-yl)-4H-pyrido[1,2-a]pyrimidin-4-one
[1726] 7-{3-[(diethylamino)methyl]azetidin-1-yl}-2-(4,6-dimethylpyrazolo[1,5-a]pyrazin-2-yl)-4H-pyrido[1,2-a]pyrimidin-4-one
[1727] 2-(1-ethyl-3-methylpyrrolo[1,2-a]pyrazin-7-yl)-7-[(8aS)-hexahydropyrrolo[1,2-a]pyrazin-2(1H)-yl]-4H-pyrido[1,2-a]pyrimidin-4-one
[1728] 2-(4-ethyl-6-methylpyrazolo[1,5-a]pyrazin-2-yl)-9-methyl-7-[(3R)-3-methylpiperazin-1-yl]-4H-pyrido[1,2-a]pyrimidin-4-one
[1729] 9-methyl-2-(1-methyl-1H-indazol-5-yl)-7-(1-methylpiperidin-4-yl)-4H-pyrido[1,2-a]pyrimidin-4-one
[1730] 7-[(3R)-3,4-dimethylpiperazin-1-yl]-2-(4-ethyl-6-methylpyrazolo[1,5-a]pyrazin-2-yl)-9-methyl-4H-pyrido[1,2-a]pyrimidin-4-one
[1731] 7-(1-ethylpiperidin-4-yl)-9-methyl-2-(1-methyl-1H-indazol-5-yl)-4H-pyrido[1,2-a]pyrimidin-4-one
[1732] 2-(4-ethyl-6-methylpyrazolo[1,5-a]pyrazin-2-yl)-9-methyl-7-[(3S)-3-methylpiperazin-1-yl]-4H-pyrido[1,2-a]pyrimidin-4-one
[1733] 7-[1-(2-hydroxyethyl)piperidin-4-yl]-9-methyl-2-(1-methyl-1H-indazol-5-yl)-4H-pyrido[1,2-a]pyrimidin-4-one
[1734] 7-[(3S)-3,4-dimethylpiperazin-1-yl]-2-(4-ethyl-6-methylpyrazolo[1,5-a]pyrazin-2-yl)-9-methyl-4H-pyrido[1,2-a]pyrimidin-4-one
[1735] 2-(4-ethyl-6-methylpyrazolo[1,5-a]pyrazin-2-yl)-7-(1-ethylpiperidin-4-yl)-9-methyl-4H-pyrido[1,2-a]pyrimidin-4-one
[1736] 9-methyl-2-(2-methyl-2H-indazol-5-yl)-7-(1,2,3,6-tetrahydropyridin-4-yl)-4H-pyrazino[1,2-a]pyrimidin-4-one
[1737] 7-(1-cyclobutylpiperidin-4-yl)-2-(4-ethyl-6-methylpyrazolo[1,5-a]pyrazin-2-yl)-9-methyl-4H-pyrido[1,2-a]pyrimidin-4-one
[1738] 2-(4-ethyl-6-methylpyrazolo[1,5-a]pyrazin-2-yl)-7-[1-(2-hydroxyethyl)piperidin-4-yl]-9-methyl-4H-pyrido[1,2-a]pyrimidin-4-one
[1739] 2-(8-ethyl-2-methylimidazo[1,2-a]pyridin-6-yl)-7-[(8aR)-hexahydropyrrolo[1,2-a]pyrazin-2(1H)-yl]-4H-pyrido[1,2-a]pyrimidin-4-one
[1740] 2-(8-ethyl-2-methylimidazo[1,2-a]pyridin-6-yl)-7-[(8aS)-hexahydropyrrolo[1,2-a]pyrazin-2(1H)-yl]-4H-pyrido[1,2-a]pyrimidin-4-one
[1741] 9-methyl-2-(2-methyl-2H-indazol-5-yl)-7-(piperidin-4-yl)-4H-pyrazino[1,2-a]pyrimidin-4-one
[1742] 7-[(3R)-3-(aminomethyl)pyrrolidin-1-yl]-2-(4,6-dimethylpyrazolo[1,5-a]pyrazin-2-yl)-4H-pyrido[1,2-a]pyrimidin-4-one
[1743] 2-(4,6-dimethylpyrazolo[1,5-a]pyrazin-2-yl)-7-[(2S,6S)-2,6-dimethyl-1,2,3,6-tetrahydropyridin-4-yl]-4H-pyrido[1,2-a]pyrimidin-4-one
[1744] 7-{(3R)-3-[(dimethylamino)methyl]pyrrolidin-1-yl}-2-(4,6-dimethylpyrazolo[1,5-a]pyrazin-2-yl)-4H-pyrido[1,2-a]pyrimidin-4-one
[1745] 7-[(2S,6S)-2,6-dimethylpiperidin-4-yl]-2-(4,6-dimethylpyrazolo[1,5-a]pyrazin-2-yl)-4H-pyrido[1,2-a]pyrimidin-4-one
[1746] 2-(8-fluoro-2-methylimidazo[1,2-a]pyridin-6-yl)-7-[4-(2-hydroxyethyl)piperazin-1-yl]-4H-pyrido[1,2-a]pyrimidin-4-one
[1747] 2-(imidazo[1,2-a]pyridin-6-yl)-7-(4-methylpiperazin-1-yl)-4H-pyrido[1,2-a]pyrimidin-4-one
[1748] 2-(4-fluoro-2-methyl-1,3-benzoxazol-6-yl)-7-[(8aS)-hexahydropyrrolo[1,2-a]pyrazin-2(1H)-yl]-4H-pyrido[1,2-a]pyrimidin-4-one
[1749] 7-(2,7-diazaspiro[3.5]non-7-yl)-2-(4,6-dimethylpyrazolo[1,5-a]pyrazin-2-yl)-4H-pyrido[1,2-a]pyrimidin-4-one
[1750] 7-(4-methylpiperazin-1-yl)-2-(2-methyl[1,2,4]triazolo[1,5-a]pyridin-6-yl)-4H-pyrido[1,2-a]pyrimidin-4-one
[1751] 7-(4-methylpiperazin-1-yl)-2-[2-methyl-8-(trifluoromethyl)imidazo[1,2-a]pyridin-6-yl]-4H-pyrido[1,2-a]pyrimidin-4-one
[1752] 2-methyl-6-[7-(4-methylpiperazin-1-yl)-4-oxo-4H-pyrido[1,2-a]pyrimidin-2-yl]imidazo[1,2-a]pyridine-8-carbonitrile 2-(2,8-dimethylimidazo[1,2-a]pyridin-6-yl)-7-(4-methylpiperazin-1-yl)-4H-pyrido[1,2-a]pyrimidin-4-one
[1753] 7-(4,7-diazaspiro[2.5]oct-7-yl)-2-(2,8-dimethylimidazo[1,2-a]pyridin-6-yl)-4H-pyrido[1,2-a]pyrimidin-4-one
[1754] 2-(8-fluoro-2-methylimidazo[1,2-a]pyridin-6-yl)-7-(1-methylpiperidin-4-yl)-4H-pyrido[1,2-a]pyrimidin-4-one
[1755] 2-(8-fluoro-2-methylimidazo[1,2-a]pyridin-6-yl)-7-(4-hydroxypiperidin-4-yl)-4H-pyrido[1,2-a]pyrimidin-4-one
[1756] 2-(4-ethyl-6-methylpyrazolo[1,5-a]pyrazin-2-yl)-7-[(8aS)-hexahydropyrrolo[1,2-a]pyrazin-2(1H)-yl]-4H-pyrido[1,2-a]pyrimidin-4-one
[1757] 2-(4-ethyl-6-methylpyrazolo[1,5-a]pyrazin-2-yl)-7-[(8aR)-hexahydropyrrolo[1,2-a]pyrazin-2(1H)-yl]-4H-pyrido[1,2-a]pyrimidin-4-one
[1758] 7-[(3R)-3-(dimethylamino)pyrrolidin-1-yl]-2-(4-ethyl-6-methylpyrazolo[1,5-a]pyrazin-2-yl)-4H-pyrido[1,2-a]pyrimidin-4-one
[1759] 7-[(3S)-3-(dimethylamino)pyrrolidin-1-yl]-2-(4-ethyl-6-methylpyrazolo[1,5-a]pyrazin-2-yl)-4H-pyrido[1,2-a]pyrimidin-4-one
[1760] 2-(8-fluoro-2-methylimidazo[1,2-a]pyridin-6-yl)-7-[(8aS)-8a-methylhexahydropyrrolo[1,2-a]pyrazin-2(1H)-yl]-4H-pyrido[1,2-a]pyrimidin-4-one
[1761] 2-(4-ethyl-6-methylpyrazolo[1,5-a]pyrazin-2-yl)-7-(4-ethylpiperazin-1-yl)-9-methyl-4H-pyrido[1,2-a]pyrimidin-4-one
[1762] 2-(4-ethyl-6-methylpyrazolo[1,5-a]pyrazin-2-yl)-7-[(8aS)-hexahydropyrrolo[1,2-a]pyrazin-2(1H)-yl]-9-methyl-4H-pyrido[1,2-a]pyrimidin-4-one
[1763] 2-(2,8-dimethylimidazo[1,2-a]pyridin-6-yl)-7-(4-ethylpiperazin-1-yl)-4H-pyrido[1,2-a]pyrimidin-4-one
[1764] 2-(2,8-dimethylimidazo[1,2-a]pyridin-6-yl)-7-[(8aS)-hexahydropyrrolo[1,2-a]pyrazin-2(1H)-yl]-4H-pyrido[1,2-a]pyrimidin-4-one
[1765] 2-(2,8-dimethylimidazo[1,2-a]pyridin-6-yl)-7-(8a-methylhexahydropyrrolo[1,2-a]pyrazin-2(1H)-yl)-4H-pyrido[1,2-a]pyrimidin-4-one
[1766] 7-[(3R)-3-(dimethylamino)pyrrolidin-1-yl]-2-(4-ethyl-6-methylpyrazolo[1,5-a]pyrazin-2-yl)-9-methyl-4H-pyrido[1,2-a]pyrimidin-4-one
[1767] 2-(4-ethyl-6-methylpyrazolo[1,5-a]pyrazin-2-yl)-7-{[2-(morpholin-4-yl)ethyl]amino}-4H-pyrido[1,2-a]pyrimidin-4-one
[1768] 7-{[2-(dimethylamino)ethyl]amino}-2-(4-ethyl-6-methylpyrazolo[1,5-a]pyrazin-2-yl)-4H-pyrido[1,2-a]pyrimidin-4-one
[1769] 7-{[2-(dimethylamino)ethyl](methyl)amino}-2-(4-ethyl-6-methylpyrazolo[1,5-a]pyrazin-2-yl)-4H-pyrido[1,2-a]pyrimidin-4-one
[1770] 2-(4-ethyl-6-methylpyrazolo[1,5-a]pyrazin-2-yl)-7-{methyl[2-(methylamino)ethyl]amino}-4H-pyrido[1,2-a]pyrimidin-4-one
[1771] 7-[(3R)-3-(dimethylamino)pyrrolidin-1-yl]-2-(2,8-dimethylimidazo[1,2-a]pyridin-6-yl)-4H-pyrido[1,2-a]pyrimidin-4-one
[1772] 7-[(3S)-3-(dimethylamino)pyrrolidin-1-yl]-2-(2,8-dimethylimidazo[1,2-a]pyridin-6-yl)-4H-pyrido[1,2-a]pyrimidin-4-one
[1773] 7-[2-(dimethylamino)ethoxy]-2-(4-ethyl-6-methylpyrazolo[1,5-a]pyrazin-2-yl)-9-methyl-4H-pyrido[1,2-a]pyrimidin-4-one
[1774] 7-[2-(dimethylamino)ethoxy]-2-(4-ethyl-6-methylpyrazolo[1,5-a]pyrazin-2-yl)-4H-pyrido[1,2-a]pyrimidin-4-one
[1775] 2-(4-ethyl-6-methylpyrazolo[1,5-a]pyrazin-2-yl)-7-(piperidin-4-ylmethoxy)-4H-pyrido[1,2-a]pyrimidin-4-one
[1776] 2-(4-ethyl-6-methylpyrazolo[1,5-a]pyrazin-2-yl)-7-[2-(piperidin-1-yl)ethoxy]-4H-pyrido[1,2-a]pyrimidin-4-one
[1777] 2-(4-ethyl-6-methylpyrazolo[1,5-a]pyrazin-2-yl)-7-[3-(morpholin-4-yl)propoxy]-4H-pyrido[1,2-a]pyrimidin-4-one
[1778] 7-[3-(dimethylamino)propoxy]-2-(4-ethyl-6-methylpyrazolo[1,5-a]pyrazin-2-yl)-4H-pyrido[1,2-a]pyrimidin-4-one, or
[1779] 2-(4,6-dimethylpyrazolo[1,5-a]pyrazin-2-yl)-7-[(3aR,6aS)-5-methylhexahydropyrrolo[3,4-c]pyrrol-2(1H)-yl]-4H-pyrido[1,2-a]pyrimidin-4-one
   or a salt, isotopologue, stereoisomer, racemate, enantiomer, diastereomer or tautomer thereof.

[1780] In another embodiment, the compound of Formula (I) used in a method disclosed herein is a compound selected from the group consisting of:
[1781] 2-(3,5-difluoro-4-hydroxyphenyl)-7-(piperazin-1-yl)-4H-pyrido[1,2-a]pyrimidin-4-one hydrochloride
[1782] 7-[4-(dimethylamino)piperidin-1-yl]-2-(3-fluoro-4-methoxyphenyl)-4H-quinolizin-4-one acetate
[1783] 2-(2-methyl-1,3-benzothiazol-6-yl)-7-(piperidin-4-yl)-4H-pyrimido[1,2-b]pyridazin-4-one trifluoroacetate (1:1), or
[1784] 2-(1,3-dimethylpyrrolo[1,2-a]pyrazin-7-yl)-7-(1,2,3,6-tetrahydropyridin-4-yl)-4H-pyrazino[1,2-a]pyrimidin-4-one hydrochloride (1:2)
   or a free base, isotopologue, stereoisomer, racemate, enantiomer, diastereomer or tautomer thereof.

[1785] Compounds of Formula (I) can be prepared using reagents and methods known in the art, including the methods provided in International Application No. PCT/US2013/025292, filed on Feb. 8, 2013, and published as International Publication No. WO 2013/119916 on Aug. 15, 2013, the entire contents which are incorporated herein by reference (see in particular, General Synthetic Methods, Schemes A-J, at paragraphs [001126] to [001159]; and Specific Synthetic Examples, at paragraphs [001160] to [001573] and Table 1, therein).

### Terminology

[1786] The chemical terms used above and throughout the description herein, unless specifically defined otherwise, shall be understood by one of ordinary skill in the art to have the following indicated meanings.

[1787] As used herein, the term “C₁₋₈alkyl” generally refers to saturated hydrocarbon radicals having from one to eight carbon atoms in a straight or branched chain configuration, including, but not limited to, methyl, ethyl, n-propyl (also referred to as propyl or propanyl), isopropyl, n-butyl (also referred to as butyl or butanyl), isobutyl, sec-butyl, tert-butyl, n-pentyl (also referred to as pentyl or pentanyl), n-hexyl (also referred to as hexyl or hexanyl), n-heptyl (also referred to as heptyl or heptanyl), n-octyl and the like. In some embodiments, C₁₋₈alkyl includes, but is not limited to, C₁₋₆alkyl, C₁₋₈alkyl and the like. A C₁₋₈alkyl radical is optionally substituted with substituent species as described herein where allowed by available valences.

[1788] As used herein, the term “C₂₋₈alkenyl” generally refers to partially unsaturated hydrocarbon radicals having from two to eight carbon atoms in a straight or branched chain configuration and one or more carbon-carbon double bonds therein, including, but not limited to, ethenyl (also referred to as vinyl), allyl, propenyl and the like. In some embodiments, C₂₋₈alkenyl includes, but is not limited to, C₂₋₆alkenyl, C₂₋₄alkenyl and the like. A C₂₋₈alkenyl radical is optionally substituted with substituent species as described herein where allowed by available valences.

[1789] As used herein, the term “C₂₋₄alkynyl” generally refers to partially unsaturated hydrocarbon radicals having from two to eight carbon atoms in a straight or branched chain configuration and one or more carbon-carbon triple bonds therein, including, but not limited to, ethynyl, propynyl, butynyl and the like. In some embodiments, C₂₋₈alkynyl includes, but is not limited to, C₂₋₈alkynyl, C₂₋₄alkynyl and the like. A C₂₋₈alkynyl radical is optionally substituted with substituent species as described herein where allowed by available valences.

[1790] As used herein, the term “C₁₋₈alkoxy” generally refers to saturated hydrocarbon radicals having from one to eight carbon atoms in a straight or branched chain configuration of the formula: —O—C₁₋₈alkyl, including, but not limited to, methoxy, ethoxy, n-propoxy, isopropoxy, n-butoxy, isobutoxy, sec-butoxy, tert-butoxy, n-pentoxy, n-hexoxy and the like. In some embodiments, C₁₋₈alkoxy includes, but is not limited to, C₁₋₈alkoxy, C₁₋₈alkoxy and the like. A C₁₋₈alkoxy radical is optionally substituted with substituent species as described herein where allowed by available valences.

[1791] As used herein, the term “C₃₋₁₄cycloalkyl” generally refers to a saturated or partially unsaturated monocyclic, bicyclic or polycyclic hydrocarbon radical, including, but not limited to, cyclopropyl, cyclobutyl, cyclopentyl, cyclohexyl, cyclohexenyl, cycloheptyl, cyclooctyl, 1H-indanyl, indenyl, tetrahydro-naphthalenyl and the like. In some embodiments, C₃₋₁₄cycloalkyl includes, but is not limited to, C₃₋₈cycloalkyl, C₅₋₈cycloalkyl, C₃₋₁₀cycloalkyl and the like. A C₃₋₁₄cycloalkyl radical is optionally substituted with substituent species as described herein where allowed by available valences.

[1792] As used herein, the term “aryl” generally refers to a monocyclic, bicyclic or polycyclic aromatic carbon atom ring structure radical, including, but not limited to, phenyl, naphthyl, anthracenyl, fluorenyl, azulenyl, phenanthrenyl and the like. An aryl radical is optionally substituted with substituent species as described herein where allowed by available valences.

[1793] As used herein, the term “heteroaryl” generally refers to a monocyclic, bicyclic or polycyclic aromatic carbon atom ring structure radical in which one or more carbon atom ring members have been replaced, where allowed by structural stability, with one or more heteroatoms, such as an O, S or N atom, including, but not limited to, furanyl (also referred to as furyl), thienyl (also referred to as thiophenyl), pyrrolyl, 2H-pyrrolyl, 3H-pyrrolyl, pyrazolyl, 1H-pyrazolyl, imidazolyl, 1H-imidazolyl, isoxazolyl, isothiazolyl, oxazolyl, 1,3-thiazolyl, triazolyl (such as 1H-1,2,3-triazolyl and the like), oxadiazolyl (such as 1,2,4-oxadiazolyl, 1,3,4-oxadiazolyl and the like), thiadiazolyl, tetrazolyl (such as 1H-tetrazolyl, 2H-tetrazolyl and the like), pyridinyl (also referred to as pyridyl), pyrimidinyl, pyrazinyl, pyridazinyl, triazinyl, indolyl, 1H-indolyl, indazolyl, 1H-indazolyl, 2H-indazolyl, indolizinyl, isoindolyl, benzofuranyl, benzothienyl (also referred to as benzothiophenyl), benzoimidazolyl, 1H-benzoimidazolyl, 1,3-benzothiazolyl, 1,3-benzoxazolyl (also referred to as 1,3-benzooxazolyl), purinyl, 9H-purinyl, quinolinyl, isoquinolinyl, quinazolinyl, quinoxalinyl, 1,3-diazinyl, 1,2-diazinyl, 1,2-diazolyl, 1,4-diazanaphthalenyl, acridinyl, furo[3,2-b]pyridinyl, furo[3,2-c]pyridinyl, furo[2,3-c]pyridinyl, 6H-thieno[2,3-b]pyrrolyl, thieno[3,2-c]pyridinyl, thieno[2,3-d]pyrimidinyl, 1H-pyrrolo[2,3-b]pyridinyl, 1H-pyrrolo[2,3-c]pyridinyl, 1H-pyrrolo[3,2-b]pyridinyl, pyrrolo[1,2-a]pyrazinyl, pyrrolo[1,2-b]pyridazinyl, pyrazolo[1,5-a]pyridinyl, pyrazolo[1,5-a]pyrazinyl, imidazo[1,2-a]pyridinyl, 3H-imidazo[4,5-b]pyridinyl, imidazo[1,2-a]pyrimidinyl, imidazo[1,2-c]pyrimidinyl, imidazo[1,2-b]pyridazinyl, imidazo[1,2-a]pyrazinyl, imidazo[2,1-b][1,3]thiazolyl, imidazo[2,1-b][1,3,4]thiadiazolyl, [1,2,4]triazolo[1,5-a]pyridinyl, [1,2,4]triazolo[4,3-a]pyridinyl and the like. A heteroaryl radical is optionally substituted on a carbon or nitrogen atom ring member with substituent species as described herein where allowed by available valences.

[1794] As used herein, the term “heterocyclyl” generally refers to a saturated or partially unsaturated monocyclic, bicyclic or polycyclic carbon atom ring structure radical in which one or more carbon atom ring members have been replaced, where allowed by structural stability, with a heteroatom, such as an O, S or N atom, including, but not limited to, oxiranyl, oxetanyl, azetidinyl, tetrahydrofuranyl, pyrrolinyl, pyrrolidinyl, pyrazolinyl, pyrazolidinyl, imidazolinyl, imidazolidinyl, isoxazolinyl, isoxazolidinyl, isothiazolinyl, isothiazolidinyl, oxazolinyl, oxazolidinyl, thiazolinyl, thiazolidinyl, triazolinyl, triazolidinyl, oxadiazolinyl, oxadiazolidinyl, thiadiazolinyl, thiadiazolidinyl, tetrazolinyl, tetrazolidinyl, pyranyl, dihydro-2H-pyranyl, thiopyranyl, 1,3-dioxanyl, 1,2,5,6-tetrahydropyridinyl, 1,2,3,6-tetrahydropyridinyl, piperidinyl, piperazinyl, morpholinyl, thiomorpholinyl, 1,4-diazepanyl, 1,3-benzodioxolyl (also referred to as benzo[d][1,3]dioxolyl), 1,4-benzodioxanyl, 2,3-dihydro-1,4-benzodioxinyl (also referred to as 2,3-dihydrobenzo[b][1,4]dioxinyl), hexahydropyrrolo[3,4-b]pyrrol-(1H)-yl, (3aS,6aS)-hexahydropyrrolo[3,4-b]pyrrol-(1H)-yl, (3aR,6aR)-hexahydropyrrolo[3,4-b]pyrrol-(1H)-yl, hexahydropyrrolo[3,4-b]pyrrol-(2H)-yl, (3aS,6aS)-hexahydropyrrolo[3,4-b]pyrrol-(2H)-yl, (3aR,6aR)-hexahydropyrrolo[3,4-b]pyrrol-(2H)-yl, hexahydropyrrolo[3,4-c]pyrrol-(1H)-yl, (3aR,6aS)-hexahydropyrrolo[3,4-c]pyrrol-(1H)-yl, (3aR,6aR)-hexahydropyrrolo[3,4-c]pyrrol-(1H)-yl, octahydro-5H-pyrrolo[3,2-c]pyridinyl, octahydro-6H-pyrrolo[3,4-b]pyridinyl, (4aR,7aR)-octahydro-6H-pyrrolo[3,4-b]pyridinyl, (4aS,7aS)-octahydro-6H-pyrrolo[3,4-b]pyridinyl, hexahydropyrrolo[1,2-a]pyrazin-(1H)-yl, (7R,8aS)-hexahydropyrrolo[1,2-a]pyrazin-(1H)-yl, (8aS)-hexahydropyrrolo[1,2-a]pyrazin-(1H)-yl, (8aR)-hexahydropyrrolo[1,2-a]pyrazin-(1H)-yl, (8aS)-octahydropyrrolo[1,2-a]pyrazin-(1H)-yl, (8aR)-octahydropyrrolo[1,2-a]pyrazin-(1H)-yl, hexahydropyrrolo[1,2-a]pyrazin-(2H)-one, octahydro-2H-pyrido[1,2-a]pyrazinyl, 3-azabicyclo[3.1.0]hexyl, (1R,5S)-3-azabicyclo[3.1.0]hexyl, 8-azabicyclo[3.2.1]octyl, (1R,5S)-8-azabicyclo[3.2.1]octyl, 8-azabicyclo[3.2.1]oct-2-enyl, (1R,5S)-8-azabicyclo[3.2.1]oct-2-enyl, 9-azabicyclo[3.3.1]nonyl, (1R,5S)-9-azabicyclo[3.3.1]nonyl, 2,5-diazabicyclo[2.2.1]heptyl, (1S,4S)-2,5-diazabicyclo[2.2.1]heptyl, 2,5-diazabicyclo[2.2.2]octyl, 3,8-diazabicyclo[3.2.1]octyl, (1R,5S)-3,8-diazabicyclo[3.2.1]octyl, 1,4-diazabicyclo[3.2.2]nonyl, azaspiro[3.3]heptyl, 2,6-diazaspiro[3.3]heptyl, 2,7-diazaspiro[3.5]nonyl, 5,8-diazaspiro[3.5]nonyl, 2,7-diazaspiro[4.4]nonyl, 6,9-diazaspiro[4.5]decyl and the like. A heterocyclyl radical is optionally substituted on a carbon or nitrogen atom ring member with substituent species as described herein where allowed by available valences.

[1795] As used herein, the term “C₁₋₈alkoxy-C₁₋₈alkyl” refers to a radical of the formula: —C₁₋₈alkyl-O—C₁₋₈alkyl.

[1796] As used herein, the term “C₁₋₈alkoxy-C₁₋₈alkyl-amino” refers to a radical of the formula: —NH—C₁₋₈alkyl-O—C₁₋₈alkyl.

[1797] As used herein, the term “(C₁₋₈alkoxy-C₁₋₈alkyl)₂-amino” refers to a radical of the formula: —N(C₁₋₈alkyl-O—C₁₋₈alkyl)₂.

[1798] As used herein, the term “C₁₋₈alkoxy-C₁₋₈alkyl-amino-C₁₋₈alkoxy” refers to a radical of the formula: —O—C₁₋₈alkyl-NH—C₁₋₈alkyl-O—C₁₋₈alkyl.

[1799] As used herein, the term “(C₁₋₈alkoxy-C₁₋₈alkyl)₂-amino-C₁₋₈alkoxy” refers to a radical of the formula: —O—C₁₋₈alkyl-N(C₁₋₈alkyl-O—C₁₋₈alkyl)₂.

[1800] As used herein, the term “(C₁₋₈alkoxy-C₁₋₈alkyl)(C₁₋₈alkyl)amino-C₁₋₈alkoxy” refers to a radical of the formula: —O—C₁₋₈alkyl-N(C₁₋₈alkyl)(C₁₋₈alkyl-O—C₁₋₈alkyl).

[1801] As used herein, the term “C₁₋₈alkoxy-C₁₋₈alkyl-amino-C₁₋₈alkyl” refers to a radical of the formula: —C₁₋₈alkyl-NH—C₁₋₈alkyl-O—C₁₋₈alkyl.

[1802] As used herein, the term “(C₁₋₈alkoxy-C₁₋₈alkyl)₂-amino-C₁₋₈alkyl” refers to a radical of the formula: —C₁₋₈alkyl-N(C₁₋₈alkyl-O—C₁₋₈alkyl)₂.

[1803] As used herein, the term “(C₁₋₈alkoxy-C₁₋₈alkyl)(C₁₋₈alkyl)amino-C₁₋₈alkyl” refers to a radical of the formula: —C₁₋₈alkyl-N(C₁₋₈alkyl)(C₁₋₈alkyl-O—C₁₋₈alkyl).

[1804] As used herein, the term “C₁₋₈alkoxy-carbonyl” refers to a radical of the formula: —C(O)—O—C₁₋₈alkyl.

[1805] As used herein, the term “C₁₋₈alkoxy-carbonyl-C₂₋₈alkenyl” refers to a radical of the formula: —C₂₋₈alkenyl-C(O)—O—C₁₋₈alkyl.

[1806] As used herein, the term “C₁₋₈alkoxy-carbonyl-amino” refers to a radical of the formula: —NH—C(O)—O—C₁₋₈alkyl.

[1807] As used herein, the term “C₁₋₈alkyl-amino” refers to a radical of the formula: —NH—C₁₋₈alkyl.

[1808] As used herein, the term “(C₁₋₈alkyl)₂-amino” refers to a radical of the formula: —N(C₁₋₈alkyl)₂.

[1809] As used herein, the term “C₁₋₈alkyl-amino-C₂₋₈alkenyl” refers to a radical of the formula: —C₂₋₈alkenyl-NH—C₁₋₈alkyl.

[1810] As used herein, the term “(C₁₋₈alkyl)₂-amino-C₂₋₈alkenyl” refers to a radical of the formula: —C₂₋₈alkenyl-N(C₁₋₈alkyl)₂.

[1811] As used herein, the term “C₁₋₈alkyl-amino-C₁₋₈alkoxy” refers to a radical of the formula: —O—C₁₋₈alkyl-NH—C₁₋₈alkyl.

[1812] As used herein, the term “(C₁₋₈alkyl)₂-amino-C₁₋₈alkoxy” refers to a radical of the formula: —O—C₁₋₈alkyl-N(C₁₋₈alkyl)₂.

[1813] As used herein, the term “C₁₋₈alkyl-amino-C₁₋₈alkyl” refers to a radical of the formula: —C₁₋₈alkyl-NH—C₁₋₈alkyl.

[1814] As used herein, the term “(C₁₋₈alkyl)₂-amino-C₁₋₈alkyl” refers to a radical of the formula: —C₁₋₈alkyl-N(C₁₋₈alkyl)₂.

[1815] As used herein, the term “C₁₋₈alkyl-amino-C₁₋₈alkyl-amino” refers to a radical of the formula: —NH—C₁₋₈alkyl-NH—C₁₋₈alkyl.

[1816] As used herein, the term “(C₁₋₈alkyl)₂-amino-C₁₋₈alkyl-amino” refers to a radical of the formula: —NH—C₁₋₈alkyl-N(C₁₋₈alkyl)₂.

[1817] As used herein, the term “(C₁₋₈alkyl-amino-C₁₋₈alkyl)₂-amino” refers to a radical of the formula: —N(C₁₋₈alkyl-NH—C₁₋₈alkyl)₂.

[1818] As used herein, the term “[(C₁₋₈alkyl)₂-amino-C₁₋₈alkyl]₂-amino” refers to a radical of the formula: —N[C₁₋₈alkyl-N(C₁₋₈alkyl)₂]₂.

[1819] As used herein, the term “(C₁₋₈alkyl-amino-C₁₋₈alkyl)(C₁₋₈alkyl)amino” refers to a radical of the formula: —N(C₁₋₈alkyl)(C₁₋₈alkyl-NH—C₁₋₈alkyl).

[1820] As used herein, the term “[(C₁₋₈alkyl)₂-amino-C₁₋₈alkyl](C₁₋₈alkyl)amino” refers to a radical of the formula: —N(C₁₋₈alkyl)[C₁₋₈alkyl-N(C₁₋₈alkyl)₂].

[1821] As used herein, the term “C₁₋₈alkyl-amino-C₂₋₈alkynyl” refers to a radical of the formula: —C₂₋₈alkynyl-NH—C₁₋₈alkyl.

[1822] As used herein, the term “(C₁₋₈alkyl)₂-amino-C₂₋₈alkynyl” refers to a radical of the formula: —C₂₋₈alkynyl-N(C₁₋₈alkyl)₂.

[1823] As used herein, the term “C₁₋₈alkyl-carbonyl” refers to a radical of the formula: —C(O)—C₁₋₈alkyl.

[1824] As used herein, the term “C₁₋₈alkyl-carbonyl-amino” refers to a radical of the formula: —NH—C(O)—C₁₋₈alkyl.

[1825] As used herein, the term “C₁₋₈alkyl-thio” refers to a radical of the formula: —S—C₁₋₈alkyl.

[1826] As used herein, the term “amino-C₂₋₈alkenyl” refers to a radical of the formula: —C₂₋₈alkenyl-NH₂.

[1827] As used herein, the term “amino-C₁₋₈alkoxy” refers to a radical of the formula: —O—C₁₋₈alkyl-NH₂.

[1828] As used herein, the term “amino-C₁₋₈alkyl” refers to a radical of the formula: —C₁₋₈alkyl-NH₂.

[1829] As used herein, the term “amino-C₁₋₈alkyl-amino” refers to a radical of the formula: —NH—C₁₋₈alkyl-NH₂.

[1830] As used herein, the term “(amino-C₁₋₈alkyl)₂-amino” refers to a radical of the formula: —N(C₁₋₈alkyl-NH₂)₂.

[1831] As used herein, the term “(amino-C₁₋₈alkyl)(C₁₋₈alkyl)amino” refers to a radical of the formula: —N(C₁₋₈alkyl)(C₁₋₈alkyl-NH₂).

[1832] As used herein, the term “amino-C₂₋₈alkynyl” refers to a radical of the formula: —C₂₋₈alkynyl-NH₂.

[1833] As used herein, the term “aryl-C₁₋₈alkoxy-carbonyl” refers to a radical of the formula: —C(O)—O—C₁₋₈alkyl-aryl.

[1834] As used herein, the term “aryl-C₁₋₈alkyl” refers to a radical of the formula: —C₁₋₈alkyl-aryl.

[1835] As used herein, the term “aryl-C₁₋₈alkyl-amino” refers to a radical of the formula: —NH—C₁₋₈alkyl-aryl.

[1836] As used herein, the term “(aryl-C₁₋₈alkyl)₂-amino” refers to a radical of the formula: —N(C₁₋₈alkyl-aryl)₂.

[1837] As used herein, the term “(aryl-C₁₋₈alkyl)(C₁₋₈alkyl)amino” refers to a radical of the formula: —N(C₁₋₈alkyl)(C₁₋₈alkyl-aryl).

[1838] As used herein, the term “aryl-C₁₋₈alkyl-amino-C₁₋₈alkyl” refers to a radical of the formula: —C₁₋₈alkyl-NH—C₁₋₈alkyl-aryl.

[1839] As used herein, the term “(aryl-C₁₋₈alkyl)₂-amino-C₁₋₈alkyl” refers to a radical of the formula: —C₁₋₈alkyl-N(C₁₋₈alkyl-aryl)₂.

[1840] As used herein, the term “(aryl-C₁₋₈alkyl)(C₁₋₈alkyl)amino-C₁₋₈alkyl” refers to a radical of the formula: —C₁₋₈alkyl-N(C₁₋₈alkyl)(C₁₋₈alkyl-aryl).

[1841] As used herein, the term “aryl-amino” refers to a radical of the formula: —NH-aryl.

[1842] As used herein, the term “aryl-amino-carbonyl” refers to a radical of the formula: —C(O)—NH-aryl.

[1843] As used herein, the term “aryl-sulfonyloxy-C₁₋₈alkyl” refers to a radical of the formula: —C₁₋₈alkyl-O—SO₂-aryl.

[1844] As used herein, the term “benzoxy-carbonyl” refers to a radical of the formula: —C(O)O—CH₂-phenyl.

[1845] As used herein, the term “C₃₋₁₄cycloalkyl-C₁₋₈alkyl” refers to a radical of the formula: —C₁₋₈alkyl-C₃₋₁₄cycloalkyl.

[1846] As used herein, the term “C₃₋₁₄cycloalkyl-amino” refers to a radical of the formula: —NH—C₃₋₁₄cycloalkyl.

[1847] As used herein, the term “C₃₋₁₄cycloalkyl-oxy” refers to a radical of the formula: —O—C₃₋₁₄cycloalkyl.

[1848] As used herein, the term “halo” or “halogen” generally refers to a halogen atom radical, including fluoro, chloro, bromo and iodo.

[1849] As used herein, the term “halo-C₁₋₈alkoxy” refers to a radical of the formula: —O—C₁₋₈alkyl-halo, wherein C₁₋₈alkyl is partially or completely substituted with one or more halogen atoms where allowed by available valences.

[1850] As used herein, the term “halo-C₁₋₈alkyl” refers to a radical of the formula: —C₁₋₈alkyl-halo, wherein C₁₋₈alkyl is partially or completely substituted with one or more halogen atoms where allowed by available valences.

[1851] As used herein, the term “halo-C₁₋₈alkyl-amino” refers to a radical of the formula: —NH—C₁₋₈alkyl-halo.

[1852] As used herein, the term “(halo-C₁₋₈alkyl)(C₁₋₈alkyl)amino” refers to a radical of the formula: —N(C₁₋₈alkyl)(C₁₋₈alkyl-halo).

[1853] As used herein, the term “(halo-C₁₋₈alkyl)₂-amino” refers to a radical of the formula: —N(C₁₋₈alkyl-halo)₂.

[1854] As used herein, the term “heteroaryl-C₁₋₈alkoxy” refers to a radical of the formula: —O—C₁₋₈alkyl-heteroaryl.

[1855] As used herein, the term “heteroaryl-C₁₋₈alkyl” refers to a radical of the formula: —C₁₋₈alkyl-heteroaryl.

[1856] As used herein, the term “heteroaryl-C₁₋₈alkyl-amino” refers to a radical of the formula: —NH—C₁₋₈alkyl-heteroaryl.

[1857] As used herein, the term “(heteroaryl-C₁₋₈alkyl)₂-amino” refers to a radical of the formula: —N(C₁₋₈alkyl-heteroaryl)₂.

[1858] As used herein, the term “(heteroaryl-C₁₋₈alkyl)(C₁₋₈alkyl)amino” refers to a radical of the formula: —N(C₁₋₈alkyl)(C₁₋₈alkyl-heteroaryl).

[1859] As used herein, the term “heteroaryl-C₁₋₈alkyl-amino-C₁₋₈alkyl” refers to a radical of the formula: —C₁₋₈alkyl-NH—C₁₋₈alkyl-heteroaryl.

[1860] As used herein, the term “(heteroaryl-C₁₋₈alkyl)₂-amino-C₁₋₈alkyl” refers to a radical of the formula: —C₁₋₈alkyl-N(C₁₋₈alkyl-heteroaryl)₂.

[1861] As used herein, the term “(heteroaryl-C₁₋₈alkyl)(C₁₋₈alkyl)amino-C₁₋₈alkyl” refers to a radical of the formula: —C₁₋₈alkyl-N(C₁₋₈alkyl)(C₁₋₈alkyl-heteroaryl).

[1862] As used herein, the term “heteroaryl-amino” refers to a radical of the formula: —NH-heteroaryl.

[1863] As used herein, the term “heterocyclyl-C₁₋₈alkoxy” refers to a radical of the formula: —O—C₁₋₈alkyl-heterocyclyl.

[1864] As used herein, the term “heterocyclyl-C₁₋₈alkyl” refers to a radical of the formula: —C₁₋₈alkyl-heterocyclyl.

[1865] As used herein, the term “heterocyclyl-C₁₋₈alkyl-amino” refers to a radical of the formula: —NH—C₁₋₈alkyl-heterocyclyl.

[1866] As used herein, the term “(heterocyclyl-C₁₋₈alkyl)₂-amino” refers to a radical of the formula: —N(C₁₋₈alkyl-heterocyclyl)₂.

[1867] As used herein, the term “(heterocyclyl-C₁₋₈alkyl)(C₁₋₈alkyl)amino” refers to a radical of the formula: —N(C₁₋₈alkyl)(C₁₋₈alkyl-heterocyclyl).

[1868] As used herein, the term “heterocyclyl-C₁₋₈alkyl-amino-C₁₋₈alkyl” refers to a radical of the formula: —C₁₋₈alkyl-NH—C₁₋₈alkyl-heterocyclyl.

[1869] As used herein, the term “(heterocyclyl-C₁₋₈alkyl)₂-amino-C₁₋₈alkyl” refers to a radical of the formula: —C₁₋₈alkyl-N(C₁₋₈alkyl-heterocyclyl)₂.

[1870] As used herein, the term “(heterocyclyl-C₁₋₈alkyl)(C₁₋₈alkyl)amino-C₁₋₈alkyl” refers to a radical of the formula: —C₁₋₈alkyl-N(C₁₋₈alkyl)(C₁₋₈alkyl-heterocyclyl).

[1871] As used herein, the term “heterocyclyl-amino” refers to a radical of the formula: —NH-heterocyclyl.

[1872] As used herein, the term “(heterocyclyl)(C₁₋₈alkyl)amino” refers to a radical of the formula: —N(C₁₋₈alkyl)(heterocyclyl).

[1873] As used herein, the term “heterocyclyl-amino-C₁₋₈alkyl” refers to a radical of the formula: —C₁₋₈alkyl-NH-heterocyclyl.

[1874] As used herein, the term “heterocyclyl-carbonyl” refers to a radical of the formula: —C(O)-heterocyclyl.

[1875] As used herein, the term “heterocyclyl-carbonyl-oxy” refers to a radical of the formula: —O—C(O)-heterocyclyl.

[1876] As used herein, the term “heterocyclyl-oxy” refers to a radical of the formula: —O-heterocyclyl.

[1877] As used herein, the term “hydroxy” refers to a radical of the formula: —OH.

[1878] As used herein, the term “hydroxy-C₁₋₈alkoxy-C₁₋₈alkyl” refers to a radical of the formula: —C₁₋₈alkyl-O—C₁₋₈alkyl-OH.

[1879] As used herein, the term “hydroxy-C₁₋₈alkyl” refers to a radical of the formula: —C₁₋₈alkyl-OH, wherein C₁₋₈alkyl is partially or completely substituted with one or more hydroxy radicals where allowed by available valences.

[1880] As used herein, the term “hydroxy-C₁₋₈alkyl-amino” refers to a radical of the formula: —NH—C₁₋₈alkyl-OH.

[1881] As used herein, the term “(hydroxy-C₁₋₈alkyl)₂-amino” refers to a radical of the formula: —N(C₁₋₈alkyl-OH)₂.

[1882] As used herein, the term “(hydroxy-C₁₋₈alkyl)(C₁₋₈alkyl)amino” refers to a radical of the formula: —N(C₁₋₈alkyl)(C₁₋₈alkyl-OH).

[1883] As used herein, the term “hydroxy-C₁₋₈alkyl-amino-C₁₋₈alkyl” refers to a radical of the formula: —C₁₋₈alkyl-NH—C₁₋₈alkyl-OH.

[1884] As used herein, the term “(hydroxy-C₁₋₈alkyl)₂-amino-C₁₋₈alkyl” refers to a radical of the formula: —C₁₋₈alkyl-N(C₁₋₈alkyl-OH)₂.

[1885] As used herein, the term “(hydroxy-C₁₋₈alkyl)(C₁₋₈alkyl)amino-C₁₋₈alkyl” refers to a radical of the formula: —C₁₋₈alkyl-N(C₁₋₈alkyl)(C₁₋₈alkyl-OH).

[1886] As used herein, the term “hydroxy-C₁₋₈alkyl-amino-C₁₋₈alkoxy” refers to a radical of the formula: —O—C₁₋₈alkyl-NH—C₁₋₈alkyl-OH.

[1887] As used herein, the term “(hydroxy-C₁₋₈alkyl)₂-amino-C₁₋₈alkoxy” refers to a radical of the formula: —O—C₁₋₈alkyl-N(C₁₋₈alkyl-OH)₂.

[1888] As used herein, the term “(hydroxy-C₁₋₈alkyl)(C₁₋₈alkyl)amino-C₁₋₈alkoxy” refers to a radical of the formula: —O—C₁₋₈alkyl-N(C₁₋₈alkyl)(C₁₋₈alkyl-OH).

[1889] As used herein, the term “hydroxy-C₁₋₈alkyl-amino-C₁₋₈alkyl-amino” refers to a radical of the formula: —NH—C₁₋₈alkyl-NH—C₁₋₈alkyl-OH.

[1890] As used herein, the term “(hydroxy-C₁₋₈alkyl-amino-C₁₋₈alkyl)₂-amino” refers to a radical of the formula: —N(C₁₋₈alkyl-NH—C₁₋₈alkyl-OH)₂.

[1891] As used herein, the term “(hydroxy-C₁₋₈alkyl)₂-amino-C₁₋₈alkyl-amino” refers to a radical of the formula: —NH—C₁₋₈alkyl-N(C₁₋₈alkyl-OH)₂.

[1892] As used herein, the term “(hydroxy-C₁₋₈alkyl-amino-C₁₋₈alkyl)(C₁₋₈alkyl)amino” refers to a radical of the formula: —N(C₁₋₈alkyl)(C₁₋₈alkyl-NH—C₁₋₈alkyl-OH).

[1893] As used herein, the term “[(hydroxy-C₁₋₈alkyl)₂-amino-C₁₋₈alkyl](C₁₋₈alkyl)amino” refers to a radical of the formula: —N(C₁₋₈alkyl)[C₁₋₈alkyl-N(C₁₋₈alkyl-OH)₂].

[1894] As used herein, the term “(hydroxy-C₁₋₈alkyl)(C₁₋₈alkyl)amino-C₁₋₈alkyl-amino” refers to a radical of the formula: —NH—C₁₋₈alkyl-N(C₁₋₈alkyl,C₁₋₈alkyl-OH).

[1895] As used herein, the term “[(hydroxy-C₁₋₈alkyl)(C₁₋₈alkyl)amino-C₁₋₈alkyl](C₁₋₈alkyl)amino” refers to a radical of the formula: —N(C₁₋₈alkyl)[C₁₋₈alkyl —N(C₁₋₈alkyl)(C₁₋₈alkyl-OH)].

[1896] As used herein, the term “substituent” means positional variables on the atoms of a core molecule that are attached at a designated atom position, replacing one or more hydrogen atoms on the designated atom, provided that the atom of attachment does not exceed the available valence or shared valences, such that the substitution results in a stable compound. Accordingly, combinations of substituents and/or variables are permissible only if such combinations result in stable compounds. It should also be noted that any carbon as well as heteroatom with a valence level that appears to be unsatisfied as described or shown herein is assumed to have a sufficient number of hydrogen atom(s) to satisfy the valences described or shown.

[1897] For the purposes of this description, where one or more substituent variables for a compound of Formula (I) encompass functionalities incorporated into a compound of Formula (I), each functionality appearing at any location within the disclosed compound may be independently selected, and as appropriate, independently and/or optionally substituted.

[1898] As used herein, the terms “independently selected,” or “each selected” refer to functional variables in a substituent list that may be attached more than once on the structure of a core molecule, where the pattern of substitution at each occurrence is independent of the pattern at any other occurrence. Further, the use of a generic substituent on a core structure for a compound provided herein is understood to include the replacement of the generic substituent with specie substituents that are included within the particular genus, e.g., aryl may be independently replaced with phenyl or naphthalenyl (also referred to as naphthyl) and the like, such that the resulting compound is intended to be included within the scope of the compounds described herein.

[1899] As used herein, the term “each instance of” when used in a phrase such as “ . . . aryl, aryl-C₁₋₈alkyl, heterocyclyl and heterocyclyl-C₁₋₈alkyl, wherein each instance of aryl and heterocyclyl is optionally substituted with one or two substituents . . . ” is intended to include optional, independent substitution on each of the aryl and heterocyclyl rings and on the aryl and heterocyclyl portions of aryl-C₁₋₈alkyl and heterocyclyl-C₁₋₈alkyl.

[1900] As used herein, the term “optionally substituted” means that the specified substituent variables, groups, radicals or moieties represent the scope of the genus and may be independently chosen as needed to replace one or more hydrogen atoms on the designated atom of attachment of a core molecule.

[1901] As used herein, the terms “stable compound” or “stable structure” mean a compound that is sufficiently robust to be isolated to a useful degree of purity from a reaction mixture and formulations thereof into an efficacious therapeutic agent.

[1902] Compound names provided herein were obtained using ACD Labs Index Name software provided by ACD Labs and/or ChemDraw Ultra software provided by CambridgeSoft®. When the compound name disclosed herein conflicts with the structure depicted, the structure shown will supercede the use of the name to define the compound intended. Nomenclature for substituent radicals defined herein may differ slightly from the chemical name from which they are derived; one skilled in the art will recognize that the definition of the substituent radical is intended to include the radical as found in the chemical name.

[1903] As used herein the term “aberrant” refers to a deviation from the norm of, e.g., the average healthy subject or a cell(s) or tissue sample from a healthy subject. The term “aberrant expression,” as used herein, refers to abnormal expression (up-regulated or down-regulated resulting in an excessive or deficient amount thereof) of a gene product (e.g., RNA transcript or protein) by a cell, tissue sample, or subject relative to a corresponding normal, healthy cell, tissue sample or subject. In a specific embodiment, the “aberrant expression” refers to an altered level of a gene product (e.g., RNA transcript or protein) in a cell, tissue sample, or subject relative to a corresponding normal, healthy cell, tissue sample or subject. The term “aberrant amount” as used herein refers to an altered level of a gene product (e.g., RNA, protein, polypeptide, or peptide) in a cell, tissue sample, or subject relative to a corresponding normal, healthy cell, tissue sample or subject. In specific embodiments, the amount of a gene product (e.g., RNA, protein, polypeptide, or peptide) in a cell, tissue sample, or subject relative to a corresponding cell or tissue sample from a healthy subject or a healthy subject, is considered aberrant if it is 1, 1.5, 2, 2.5, 3, 3.5, 4, 4.5, 5, 5.5, 6-fold or more above or below the amount of the gene product in the corresponding cell or tissue sample from a healthy subject or healthy subject.

[1904] The term “intronic REMS” refers to a REMS sequence present in an intron that functions as a 5′ splice site in the presence of a compound described herein. The intronic REMS, when downstream of a first branch point (BP) sequence and a first 3′ splice site (3′ ss) sequence and upstream of a second branch point (BP) sequence and a second 3′ splice site (3′ ss) sequence) (as shown in FIG. 1A) and in the presence of a compound described herein, can function as a 5′ splice site. The intronic REMS may also function as a 5′ splice site when upstream of a first branch point and a first 3′ splice site in the presence of a compound described herein (see FIG. 1B or 1C). Any one, two, three, or more or all of the following may be present endogenously or non-endogenously in the affected intron: the intronic REMS, the first BP, the second BP, the first 3′ ss, and the second 3′ss.

[1905] As used herein, a “non-endogenous” nucleotide sequence (such as a non-endogenous 5′ splice site, a non-endogenous branch point or a non-endogenous 3′ splice site) is a nucleotide sequence not naturally found to be part of a pre-RNA or a DNA sequence encoding a pre-RNA sequence. In other words, the hand of man is required to synthesize or manipulate the RNA or DNA sequence to introduce the nucleotide sequence.

[1906] As used herein, the term “non-endogenous intronic REMS” refers to a REMS sequence not naturally found to be part of an RNA sequence or naturally encoded by a DNA sequence. In other words, the hand of man is required to manipulate the RNA or DNA sequence to introduce the intronic REMS or the nucleotide sequence encoding the REMS into an intron.

[1907] As used herein, the terms “intron-derived exon,” “intronic exon,” “iExon” and “intronic exon” (collectively iExon) refers to the formation of an exon from an RNA sequence present in an intron following splicing of an RNA transcript in the presence of a compound described herein or another agent which results in an iREMS functioning as an intronic 5′ splice site. In particular, an iExon comprises the following RNA sequence as an exon when RNA splicing of an RNA transcript comprising two exons and an intron occurs in the presence of a compound described herein, wherein a first exon is upstream of the intron and a second exon is downstream of the intron, and wherein the intron comprises a first 5′ splice site, a first branch point, a first 3′ splice site, an iREMS, a second branch point, and a second 3′ splice site: the RNA sequence between the first 3′ splice site and the iREMS, as shown in FIG. 1A. One or more of the iREMS sequence, branch point and 3′ splice site may be naturally present in an intron or may be introduced into the intron. When all such elements are present or introduced, in the presence of a compound described herein the elements define an exonic boundary that enables the splicing machinery to generate an iExon in RNA, a result that would not naturally occur without the addition of a splicing modulator compound.

[1908] As used herein, the term “pseudoexon” refers to a potential exon in intronic regions of pre-mRNA that is not normally spliced into mature mRNA. A subset of pseudoexons are spliced in the presence of a compound described herein or another agent resulting from an iREMS functioning as a 5′ splice site within the pseudoexon, to form an iExon. An intronic REMS-containing pseudoexon is not known to be endogenously recognized by the splicing machinery for producing an iExon, but in the presence of a splicing modulator compound as described herein, the splicing machinery produces an iExon. Accordingly, production of an iExon from a pseudoexon is intended to be included within the scope of various aspects of the collective term “iExon.”

[1909] As used herein, the term “unannotated exon” refers to endogenous sequences that are naturally present as exons in mature mRNA product according to experimental evidence but are not annotated in NCBI's RefSeq database (https://www.ncbi.nlm.nih.gov/refseq/). Some unannotated exons contain an intronic REMS at the 5′ splice site. A REMS-containing unannotated exon is not known to be endogenously recognized by the splicing machinery for producing an iExon, but in the presence of a splicing modulator compound as described herein, the splicing machinery produces an iExon. Accordingly, production of an iExon from an unannotated exon is intended to be included within the scope of various aspects of the collective term “iExon.”

[1910] As used herein, the term “substantial change” in the context of the amount of one or more RNA transcripts (e.g., rRNA, tRNA, miRNA, siRNA, piRNA, lncRNA, pre-mRNA or mRNA transcripts), an alternative splice variant thereof or an isoform thereof, or one or more proteins thereof, each expressed as the product of one or more of genes, means that the amount of such products changes by a statistically significant amount such as, in a nonlimiting example, a p value less than a value selected from 0.1, 0.01, 0.001, or 0.0001.

[1911] As used herein, the terms “subject” and “patient” are used interchangeably to refer to an animal or any living organism having sensation and the power of voluntary movement, and which requires for its existence oxygen and organic food. Non-limiting examples include members of the human, equine, porcine, bovine, rattus, murine, canine and feline species. In some embodiments, the subject is a mammal or a warm-blooded vertebrate animal. In certain embodiments, the subject is a non-human animal. In specific embodiments, the subject is a human.

[1912] As used herein, the term “functional protein” refers to a form of a protein that retains a certain biological function or the functions of a full length protein or protein isoform encoded by a gene. Accordingly, inclusion of an iExon that is located in the protein coding region of an mRNA that expresses a functional protein is intended to be included within the scope of the description herein.

[1913] As used herein, the term “non-functional protein” refers to a form of a protein that does not retain any biological function compared to full length protein or a protein isoform encoded by a gene in the absence of a splicing modifier compound as described herein. Accordingly, inclusion of an iExon that is located in the protein coding region of an mRNA that expresses a non-functional protein is intended to be included within the scope of the description herein.

[1914] As used herein, in the context of a functional protein produced from an artificial construct, the term “produce substantially less” means that the amount of functional protein produced in the presence of a compound described herein is at least substantially 20%, 25%, 30%, 35%, 40%, 45%, 50%, 55%, 60%, 70%, 75%, 80%, 85%, 90%, 95%, 98%, or 100% less than the amount of functional protein produced in the absence of the compound.

### Compound Forms

[1915] As used herein, the terms “a compound of Formula (Ia),” “a compound of Formula (Ia1),” “a compound of Formula (Ia2),” “a compound of Formula (Ia3),” “a compound of Formula (Ia4),” “a compound of Formula (II),” “a compound of Formula (IIa),” “a compound of Formula (IIa1),” “a compound of Formula (IIa2),” “a compound of Formula (IIa3),” “a compound of Formula (IIa4),” “a compound of Formula (III),” “a compound of Formula (IIIa),” “a compound of Formula (IIIa1),” “a compound of Formula (IIIa2),” “a compound of Formula (IIIa3),” “a compound of Formula (IIIa4),” “a compound of Formula (IV),” “a compound of Formula (IVa),” “a compound of Formula (IVa1),” “a compound of Formula (IVa2),” “a compound of Formula (V),” “a compound of Formula (Va),” “a compound of Formula (Va1),” “a compound of Formula (Va2),” “a compound of Formula (VI),” “a compound of Formula (VIa),” “a compound of Formula (VIa1),” “a compound of Formula (VIa2),” “a compound of Formula (VIa3),” “a compound of Formula (VIa4),” “a compound of Formula (VII),” “a compound of Formula (VIIa),” “a compound of Formula (VIIa1),” “a compound of Formula (VIIa2),” “a compound of Formula (VIII),” “a compound of Formula (VIIIa),” “a compound of Formula (VIIIa1),” “a compound of Formula (VIIIa2),” “a compound of Formula (IX),” “a compound of Formula (IXa),” “a compound of Formula (IXa1),” “a compound of Formula (IXa2),” “a compound of Formula (IXa3),” “a compound of Formula (IXa4),” “a compound of Formula (X),” “a compound of Formula (Xa),” “a compound of Formula (Xa1),” “a compound of Formula (Xa2),” “a compound of Formula (XI),” “a compound of Formula (XIa),” “a compound of Formula (XIa1),” “a compound of Formula (XIa2),” “a compound of Formula (XII),” “a compound of Formula (XIIa),” “a compound of Formula (XIIa1),” “a compound of Formula (XIIa2),” “a compound of Formula (XIIa3),” “a compound of Formula (XIIa4),” “a compound of Formula (XIII),” “a compound of Formula (XIIIa),” “a compound of Formula (XIIIa1),” “a compound of Formula (XIIIa2),” “a compound of Formula (XIV),” “a compound of Formula (XIVa),” “a compound of Formula (XIVa1),” and “a compound of Formula (XIVa2),” each refer to subgenera of the compound of Formula (I) or a form thereof.

[1916] Rather than repeat embodiments for the various subgenera of the compound of Formula (I), in certain embodiments, the term “a compound of Formula (I) or a form thereof” is used to inclusively to refer to a compound of Formula (Ia) or a form thereof, a compound of Formula (Ia1) or a form thereof, a compound of Formula (Ia2) or a form thereof, a compound of Formula (Ia3) or a form thereof, a compound of Formula (Ia4) or a form thereof, a compound of Formula (II) or a form thereof, a compound of Formula (IIa) or a form thereof, a compound of Formula (IIa1) or a form thereof, a compound of Formula (IIa2) or a form thereof, a compound of Formula (IIa3) or a form thereof, a compound of Formula (IIa4) or a form thereof, a compound of Formula (III) or a form thereof, a compound of Formula (IIIa) or a form thereof, a compound of Formula (IIIa1) or a form thereof, a compound of Formula (IIIa2) or a form thereof, a compound of Formula (IIIa3) or a form thereof, a compound of Formula (IIIa4) or a form thereof, a compound of Formula (IV) or a form thereof, a compound of Formula (IVa) or a form thereof, a compound of Formula (IVa1) or a form thereof, a compound of Formula (IVa2) or a form thereof, a compound of Formula (V) or a form thereof, a compound of Formula (Va) or a form thereof, a compound of Formula (Va1) or a form thereof, a compound of Formula (Va2) or a form thereof, a compound of Formula (VI) or a form thereof, a compound of Formula (VIa) or a form thereof, a compound of Formula (VIa1) or a form thereof, a compound of Formula (VIa2) or a form thereof, a compound of Formula (VIa3) or a form thereof, a compound of Formula (VIa4) or a form thereof, a compound of Formula (VII) or a form thereof, a compound of Formula (VIIa) or a form thereof, a compound of Formula (VIIa1) or a form thereof, a compound of Formula (VIIa2) or a form thereof, a compound of Formula (VIII) or a form thereof, a compound of Formula (VIIIa) or a form thereof, a compound of Formula (VIIIa1) or a form thereof, a compound of Formula (VIIIa2) or a form thereof, a compound of Formula (IX) or a form thereof, a compound of Formula (IXa) or a form thereof, a compound of Formula (IXa1) or a form thereof, a compound of Formula (IXa2) or a form thereof, a compound of Formula (IXa3) or a form thereof, a compound of Formula (IXa4) or a form thereof, a compound of Formula (X) or a form thereof, a compound of Formula (Xa) or a form thereof, a compound of Formula (Xa1) or a form thereof, a compound of Formula (Xa2) or a form thereof, a compound of Formula (XI) or a form thereof, a compound of Formula (XIa) or a form thereof, a compound of Formula (XIa1) or a form thereof, a compound of Formula (XIa2) or a form thereof, a compound of Formula (XII) or a form thereof, a compound of Formula (XIIa) or a form thereof, a compound of Formula (XIIa1) or a form thereof, a compound of Formula (XIIa2) or a form thereof, a compound of Formula (XIIa3) or a form thereof, a compound of Formula (XIIa4) or a form thereof, a compound of Formula (XIII) or a form thereof, a compound of Formula (XIIIa) or a form thereof, a compound of Formula (XIIIa1) or a form thereof, a compound of Formula (XIIIa2) or a form thereof, a compound of Formula (XIV) or a form thereof, a compound of Formula (XIVa) or a form thereof, a compound of Formula (XIVa1) or a form thereof or a compound of Formula (XIVa2) or a form thereof, either separately or together.

[1917] Thus, embodiments and references to “a compound of Formula (I)” are intended to be inclusive of compounds of Formula (Ia), Formula (Ia1), Formula (Ia2), Formula (Ia3), Formula (Ia4), Formula (II), Formula (IIa), Formula (IIa1), Formula (IIa2), Formula (IIa3), Formula (IIa4), Formula (III), Formula (IIIa), Formula (IIIa1), Formula (IIIa2), Formula (IIIa3), Formula (IIIa4), Formula (IV), Formula (IVa), Formula (IVa1), Formula (IVa2), Formula (V), Formula (Va), Formula (Va1), Formula (Va2), Formula (VI), Formula (VIa), Formula (VIa1), Formula (VIa2), Formula (VIa3), Formula (VIa4), Formula (VII), Formula (VIIa), Formula (VIIa1), Formula (VIIa2), Formula (VIII), Formula (VIIIa), Formula (VIIIa1), Formula (VIIIa2), Formula (IX), Formula (IXa), Formula (IXa1), Formula (IXa2), Formula (IXa3), Formula (IXa4), Formula (X), Formula (Xa), Formula (Xa1), Formula (Xa2), Formula (XI), Formula (XIa), Formula (XIa1), Formula (XIa2), Formula (XII), Formula (XIIa), Formula (XIIa1), Formula (XIIa2), Formula (XIIa3), Formula (XIIa4), Formula (XIII), Formula (XIIIa), Formula (XIIIa1), Formula (XIIIa2), Formula (XIV), Formula (XIVa), Formula (XIVa1) and Formula (XIVa2).

[1918] As used herein, the term “form” means a compound of Formula (I) selected from a free acid, free base, salt, isotopologue, stereoisomer, racemate, enantiomer, diastereomer, or tautomer thereof.

[1919] In certain embodiments described herein, the form of the compound of Formula (I) is a selected from a salt, isotopologue, stereoisomer, racemate, enantiomer, diastereomer or tautomer thereof.

[1920] In certain embodiments described herein, the form of the compound of Formula (I) is a selected from a free acid, isotopologue, stereoisomer, racemate, enantiomer, diastereomer or tautomer thereof.

[1921] In certain embodiments described herein, the form of the compound of Formula (I) is a selected from a free base, isotopologue, stereoisomer, racemate, enantiomer, diastereomer or tautomer thereof.

[1922] In certain embodiments described herein, the form of the compound of Formula (I) is a free acid, free base or salt thereof.

[1923] In certain embodiments described herein, the form of the compound of Formula (I) is an isotopologue thereof.

[1924] In certain embodiments described herein, the form of the compound of Formula (I) is a stereoisomer, racemate, enantiomer or diastereomer thereof.

[1925] In certain embodiments described herein, the form of the compound of Formula (I) is a tautomer thereof.

[1926] In certain embodiments described herein, the form of the compound of Formula (I) is a pharmaceutically acceptable form.

[1927] In certain embodiments described herein, the compound of Formula (I) or a form thereof is isolated for use.

[1928] As used herein, the term “isolated” means the physical state of a compound of Formula (I) or a form thereof after being isolated and/or purified from a synthetic process (e.g., from a reaction mixture) or natural source or combination thereof according to an isolation or purification process or processes described herein or which are well known to the skilled artisan (e.g., chromatography, recrystallization and the like) in sufficient purity to be characterizable by standard analytical techniques described herein or well known to the skilled artisan.

[1929] As used herein, the term “protected” means that a functional group on a compound of Formula (I) is in a form modified to preclude undesired side reactions at the protected site when the compound is subjected to a reaction. Suitable protecting groups will be recognized by those with ordinary skill in the art as well as by reference to standard textbooks such as, for example, T. W. Greene et al, Protective Groups in Organic Synthesis (1991), Wiley, New York.

[1930] Prodrugs of a compound of Formula (I) or a form thereof are also contemplated herein.

[1931] As used herein, the term “prodrug” means that a functional group on a compound of Formula (I) is in a form (e.g., acting as an active or inactive drug precursor) that is transformed in vivo to yield an active or more active compound of Formula (I) or a form thereof. The transformation may occur by various mechanisms (e.g., by metabolic and/or non-metabolic chemical processes), such as, for example, by hydrolysis and/or metabolism in blood, liver and/or other organs and tissues. A discussion of the use of prodrugs is provided by V. J. Stella, et. al., “Biotechnology: Pharmaceutical Aspects, Prodrugs: Challenges and Rewards,” American Association of Pharmaceutical Scientists and Springer Press, 2007.

[1932] In one example, when a compound of Formula (I) or a form thereof contains a carboxylic acid functional group, a prodrug can comprise an ester formed by the replacement of the hydrogen atom of the acid group with a functional group such as alkyl and the like. In another example, when a compound of Formula (I) or a form thereof contains an alcohol functional group, a prodrug can be formed by the replacement of the hydrogen atom of the alcohol group with a functional group such as alkyl or substituted carbonyl and the like. In another example, when a compound of Formula (I) or a form thereof contains an amine functional group, a prodrug can be formed by the replacement of one or more amine hydrogen atoms with a functional group such as alkyl or substituted carbonyl. In another example, when a compound of Formula (I) or a form thereof contains a hydrogen substituent, a prodrug can be formed by the replacement of one or more hydrogen atoms with an alkyl substituent.

[1933] Pharmaceutically acceptable prodrugs of compounds of Formula (I) or a form thereof include those compounds substituted with one or more of the following groups: carboxylic acid esters, sulfonate esters, amino acid esters phosphonate esters, mono-, di- or triphosphate esters or alkyl substituents where appropriate. As described herein, it is understood by a person of ordinary skill in the art that one or more of such substituents may be used to provide a compound of Formula (I) or a form thereof for use as a prodrug.

[1934] The compounds of Formula (I) can form salts which are intended to be included within the scope of this description. Reference to a compound of Formula (I) herein is understood to include reference to salts thereof, unless otherwise indicated. The term “salt(s)”, as employed herein, denotes acidic salts formed with inorganic and/or organic acids, as well as basic salts formed with inorganic and/or organic bases. In addition, when a compound of Formula (I) contains both a basic moiety, such as, but not limited to a pyridine or imidazole, and an acidic moiety, such as, but not limited to a carboxylic acid, zwitterions (“inner salts”) may be formed and are included within the term “salt(s)” as used herein.

[1935] The term “pharmaceutically acceptable salt(s)”, as used herein, means those salts of compounds described herein that are safe and effective (i.e., non-toxic, physiologically acceptable) for use in mammals and that possess biological activity, although other salts are also useful. Salts of the compounds of Formula (I) may be formed, for example, by reacting a compound of Formula (I) with an amount of acid or base, such as an equivalent or stoichiometric amount, in a medium such as one in which the salt precipitates or in an aqueous medium followed by lyophilization.

[1936] Pharmaceutically acceptable salts include one or more salts of acidic or basic groups present in compounds described herein. Embodiments of acid addition salts include, and are not limited to, acetate, acid phosphate, ascorbate, benzoate, benzenesulfonate, bisulfate, bitartrate, borate, butyrate, chloride, citrate, camphorate, camphorsulfonate, ethanesulfonate, formate, fumarate, gentisinate, gluconate, glucaronate, glutamate, hydrobromide, hydrochloride, dihydrochloride, hydroiodide, isonicotinate, lactate, maleate, methanesulfonate, naphthalenesulfonate, nitrate, oxalate, pamoate, pantothenate, phosphate, propionate, saccharate, salicylate, succinate, sulfate, tartrate, thiocyanate, toluenesulfonate (also known as tosylate), trifluoroacetate salts and the like. One or more embodiments of acid addition salts include a chloride, hydrochloride, dihydrochloride, trihydrochloride, hydrobromide, acetate, diacetate or trifluoroacetate salt. More particular embodiments include a chloride, hydrochloride, dihydrochloride, hydrobromide or trifluoroacetate salt.

[1937] Additionally, acids which are generally considered suitable for the formation of pharmaceutically useful salts from basic pharmaceutical compounds are discussed, for example, by P. Stahl et al, Camille G. (eds.) Handbook of Pharmaceutical Salts. Properties, Selection and Use. (2002) Zurich: Wiley-VCH; S. Berge et al, Journal of Pharmaceutical Sciences (1977) 66(1) 1-19; P. Gould, International J. of Pharmaceutics (1986) 33, 201-217; Anderson et al, The Practice of Medicinal Chemistry (1996), Academic Press, New York; and in The Orange Book (see, website for Food & Drug Administration, Washington, D.C.). These disclosures are incorporated herein by reference thereto.

[1938] Suitable basic salts include, but are not limited to, aluminum, ammonium, calcium, lithium, magnesium, potassium, sodium, zinc, and diethanolamine salts. Certain compounds described herein can also form pharmaceutically acceptable salts with organic bases (for example, organic amines) such as, but not limited to, dicyclohexylamines, tert-butyl amines and the like, and with various amino acids such as, but not limited to, arginine, lysine and the like. Basic nitrogen-containing groups may be quarternized with agents such as lower alkyl halides (e.g., methyl, ethyl, and butyl chlorides, bromides and iodides), dialkyl sulfates (e.g., dimethyl, diethyl, and dibutyl sulfates), long chain halides (e.g., decyl, lauryl, and stearyl chlorides, bromides and iodides), aralkyl halides (e.g., benzyl and phenethyl bromides), and others.

[1939] All such acid salts and base salts are intended to be pharmaceutically acceptable salts within the scope of the description herein and all such acid and base salts are considered equivalent to the free forms of the corresponding compounds for the purposes described herein.

[1940] Compounds of Formula I and forms thereof may further exist in a tautomeric form. All such tautomeric forms are contemplated herein as part of the present description.

[1941] The compounds of Formula (I) may contain asymmetric or chiral centers, and, therefore, may exist in different stereoisomeric forms. The present description is intended to include all stereoisomeric forms of the compounds of Formula (I) as well as mixtures thereof, including racemic mixtures.

[1942] The compounds of Formula (I) described herein may include one or more chiral centers, and as such may exist as racemic mixtures (R/S) or as substantially pure enantiomers and diastereomers. The compounds may also exist as substantially pure (R) or (S) enantiomers (when one chiral center is present). In one embodiment, the compounds of Formula (I) described herein are (S) isomers and may exist as enantiomerically pure compositions substantially comprising only the (S) isomer. In another embodiment, the compounds of Formula (I) described herein are (R) isomers and may exist as enantiomerically pure compositions substantially comprising only the (R) isomer. As one of skill in the art will recognize, when more than one chiral center is present, the compounds of Formula (I) described herein may also include portions described as an (R,R), (R,S), (S,R) or (S,S) isomer, as defined by IUPAC Nomenclature Recommendations.

[1943] As used herein, the term “substantially pure” refers to compounds consisting substantially of a single isomer in an amount greater than or equal to 90%, in an amount greater than or equal to 92%, in an amount greater than or equal to 95%, in an amount greater than or equal to 98%, in an amount greater than or equal to 99%, or in an amount equal to 100% of the single isomer.

[1944] In one aspect, a compound of Formula (I) is a substantially pure (S) enantiomer present in an amount greater than or equal to 90%, in an amount greater than or equal to 92%, in an amount greater than or equal to 95%, in an amount greater than or equal to 98%, in an amount greater than or equal to 99%, or in an amount equal to 100%.

[1945] In one aspect, a compound of Formula (I) is a substantially pure (R) enantiomer present in an amount greater than or equal to 90%, in an amount greater than or equal to 92%, in an amount greater than or equal to 95%, in an amount greater than or equal to 98%, in an amount greater than or equal to 99%, or in an amount equal to 100%.

[1946] As used herein, a “racemate” is any mixture of isometric forms that are not “enantiomerically pure”, including mixtures such as, without limitation, in a ratio of about 50/50, about 60/40, about 70/30, about 80/20, about 85/15 or about 90/10.

[1947] In addition, the present description embraces all geometric and positional isomers. For example, if a compound of Formula (I) incorporates a double bond or a fused ring, both the cis- and trans-forms, as well as mixtures, are embraced within the scope of the description herein.

[1948] Diastereomeric mixtures can be separated into their individual diastereomers on the basis of their physical chemical differences by methods well known to those skilled in the art, such as, for example, by chromatography and/or fractional crystallization. Enantiomers can be separated by use of chiral HPLC column or other chromatographic methods known to those skilled in the art.

[1949] Enantiomers can also be separated by converting the enantiomeric mixture into a diastereomeric mixture by reaction with an appropriate optically active compound (e.g., chiral auxiliary such as a chiral alcohol or Mosher's acid chloride), separating the diastereomers and converting (e.g., hydrolyzing) the individual diastereomers to the corresponding pure enantiomers. Also, some of the compounds of Formula (I) may be atropisomers (e.g., substituted biaryls) and are considered part of this description.

[1950] All stereoisomer forms (for example, geometric isomers, optical isomers, positional isomers and the like) of the present compounds (including salts, solvates, esters and prodrugs and transformed prodrugs thereof) which may exist due to asymmetric carbons on various substituents, including enantiomeric forms (which may exist even in the absence of asymmetric carbons), rotameric forms, atropisomers, diastereomeric forms and regioisomeric forms are contemplated within the scope of the description herein. For example, if a compound of Formula (I) incorporates a double bond or a fused ring, both the cis- and trans-forms, as well as mixtures thereof, are embraced within the scope of the description herein. Also, for example, all keto-enol and imine-enamine tautomeric forms of the compounds are included in the description herein. Individual stereoisomers of the compounds of Formula (I) described herein may, for example, be substantially free of other isomers, or may be present in a racemic mixture, as described supra.

[1951] The use of the terms “salt,” “prodrug” and “transformed prodrug” are intended to equally apply to the salts, prodrugs and transformed prodrugs of all contemplated isotopologues, stereoisomers, racemates or tautomers of the instant compounds.

[1952] The term “isotopologue” refers to isotopically-enriched compounds which are identical to those recited herein, but for the fact that one or more atoms are replaced by an atom having an atomic mass or mass number different from the atomic mass or mass number usually found in nature. Examples of isotopes that can be incorporated into compounds described herein include isotopes of hydrogen, carbon, nitrogen, oxygen, phosphorus, fluorine and chlorine, such as H², H³, C³, C¹⁴, N¹⁵, O¹⁸, O¹⁷, P³¹, P³², S³⁵, F¹⁸, Cl³⁵ and Cl³⁶, respectively, each of which is also within the scope of this description.

[1953] Certain isotopically-enriched compounds described herein (e.g., those labeled with H³ and C⁴) are useful in compound and/or substrate tissue distribution assays. Tritiated (i.e., H³) and carbon-14 (i.e., C¹⁴) isotopes are particularly preferred for their ease of preparation and detectability. Further, substitution with heavier isotopes such as deuterium (i.e., “deuterium enriched”) may afford certain therapeutic advantages resulting from greater metabolic stability (e.g., increased in vivo half-life or reduced dosage requirements) and hence may be preferred in some circumstances. Isotopically-enriched compounds of Formula (I) can generally be prepared using procedures known to persons of ordinary skill in the art by substituting an appropriate isotopically-enriched reagent for a non-isotopically-enriched reagent.

[1954] When the compounds are enriched with deuterium, the deuterium-to-hydrogen ratio on the deuterated atoms of the molecule substantially exceeds the naturally occurring deuterium-to-hydrogen ratio.

[1955] An embodiment described herein may include an isotopologue form of the compound of Formula (T), wherein the isotopologue is substituted on one or more atom members of the compound of Formula (I) with one or more deuterium atoms in place of one or more hydrogen atoms.

[1956] An embodiment described herein may include a compound of Formula (I) and forms thereof, wherein a carbon atom may have from 1 to 3 hydrogen atoms optionally replaced with deuterium.

[1957] One or more compounds described herein may exist in unsolvated as well as solvated forms with pharmaceutically acceptable solvents such as water, ethanol, and the like, and the description herein is intended to embrace both solvated and unsolvated forms.

[1958] As used herein, the term “solvate” means a physical association of a compound described herein with one or more solvent molecules. This physical association involves varying degrees of ionic and covalent bonding, including hydrogen bonding. In certain instances the solvate will be capable of isolation, for example when one or more solvent molecules are incorporated in the crystal lattice of the crystalline solid. As used herein, “solvate” encompasses both solution-phase and isolatable solvates. Non-limiting examples of suitable solvates include ethanolates, methanolates, and the like.

[1959] One or more compounds described herein may optionally be converted to a solvate. Preparation of solvates is generally known. A typical, non-limiting process involves dissolving a compound in a desired amount of the desired solvent (organic or water or mixtures thereof) at a higher than ambient temperature, and cooling the solution at a rate sufficient to form crystals which are then isolated by standard methods. Analytical techniques such as, for example infrared spectroscopy, show the presence of the solvent (or water) in the crystals as a solvate (or hydrate).

[1960] As used herein, the term “hydrate” means a solvate wherein the solvent molecule is water.

[1961] Polymorphic crystalline and amorphous forms of the compounds of Formula (I), and of the salts, solvates, esters and prodrugs of the compounds of Formula (I), are further intended to be included in the scope of the compounds described herein

Methods for Determining which Genes May be Modulated by the Compounds

[1962] In another aspect, provided herein are methods for determining whether the splicing of the precursor RNA of a gene is likely to be modulated by a compound of Formula (I) or a form thereof, comprising searching for the presence of an intronic REMS (i.e., a sequence functioning as a 5′ splice site) in a gene intronic sequence, wherein the presence of the intronic REMS 3′ splice site and an intronic branch point in the gene sequence indicates that the splicing of the precursor RNA of the gene is likely to be modulated by the compound of Formula (I) or a form thereof, and the absence of the intronic REMS and an intronic 3′ splice site and an intronic branch point in the gene sequence indicates that the splicing of the precursor RNA of the gene is unlikely to be modulated by the compound of Formula (I) or a form thereof. In certain embodiments, a compound of Formula (I) is a compound of Formula (II), Formula (III), Formula (IV), Formula (V), Formula (VI), Formula (VII), Formula (VIII), Formula (IX), Formula (X), Formula (XI), Formula (XII), Formula (XIII), or Formula (XIV) described herein. In specific embodiments, the methods further comprise searching for the presence of the combination of an intronic REMS, an intronic 3′ splice site and an intronic branch point in the gene sequence.

[1963] In another aspect, provided herein are methods for determining whether the amount of a product (e.g., an mRNA transcript or protein) of a gene is likely to be modulated by a compound of Formula (I) or a form thereof, comprising searching for the presence of an intronic REMS in the gene sequence, wherein the presence of the combination of an intronic REMS, an intronic 3′ splice site and an intronic branch point in the gene sequence indicates that the amount of a product (e.g., an mRNA transcript or protein) of the gene is likely to be modulated by the compound of Formula (I) or a form thereof, and the absence of the combination of an intronic REMS, an intronic 3′ splice site and an intronic branch point in the gene sequence indicates that the amount of a product (e.g., an mRNA transcript or protein) of the gene is unlikely to be modulated by the compound of Formula (I) or a form thereof. In certain embodiments, a compound of Formula (I) is a compound of Formula (II), Formula (III), Formula (IV), Formula (V), Formula (VI), Formula (VII), Formula (VIII), Formula (IX), Formula (X), Formula (XI), Formula (XII), Formula (XIII), or Formula (XIV) described herein. In specific embodiments, the methods further comprise searching for the presence of any of an intronic REMS, an intronic 3′ splice site, and an intronic branch point in the gene sequence.

[1964] The step of searching for the presence of an intronic REMS, an intronic 3′ splice site, and an intronic branch point in the gene sequence described herein can be performed by a computer system comprising a memory storing instructions for searching for the presence of the intronic REMS, the intronic 3′ splice site, and the intronic branch point in the gene sequence, or such a search can be performed manually.

[1965] In another aspect, provided herein are methods for determining whether the splicing of the precursor RNA of a gene is likely to be modulated via iExon inclusion by a compound of Formula (I) or a form thereof. In one particular aspect, the method comprises searching for the presence of an intronic REMS (i.e., a sequence functioning as a 5′ splice site) in combination with, in order, an upstream branch point and an upstream 3′ splice site in a gene intronic sequence. The presence of these elements with the intronic REMS and the endogenous presence of a downstream 3′ splice site and a downstream branch point in the gene sequence indicates that the splicing of the precursor RNA of the gene is likely to be modulated by the compound of Formula (I) or a form thereof. In this aspect, the presence of an upstream branch point and upstream 3′ splice site and the REMS in the intron enable the presence of the compound of Formula (I) or a form thereof to modulate iExon inclusion, i.e., splicing the iExon with the downstream endogenous exon (as shown in FIG. 1A). Otherwise, in the absence of these elements, the iREMS will be either ignored by the spliceosome or, in a limited set of circumstances, will become an extended/cryptic 5′ splice site for the upstream endogenous exon (as shown in FIGS. 1B and 1C). The absence of the intronic REMS in the gene sequence indicates that the splicing of the precursor RNA of the gene is unlikely to be modulated via iExon inclusion by the compound of Formula (I) or a form thereof. In certain embodiments, a compound of Formula (I) is a compound of Formula (II), Formula (III), Formula (IV), Formula (V), Formula (VI), Formula (VII), Formula (VIII), Formula (IX), Formula (X), Formula (XI), Formula (XII), Formula (XIII), or Formula (XIV) described herein. In other specific embodiments, the methods further comprise searching for the presence of the combination of, in 5′ to 3′ order: an upstream branch point, an upstream 3′ splice site, an intronic REMS, a downstream branch point and a downstream 3′ splice site in the gene sequence.

[1966] In another aspect, provided herein are methods for determining whether the amount of a product (e.g., an mRNA transcript or protein) of a gene is likely to be modulated via iExon inclusion by a compound of Formula (T) or a form thereof, comprising searching for the presence of an intronic REMS in the gene sequence, wherein the presence of the combination of at least an upstream branch point, an upstream 3′ splice site and an intronic REMS in the gene sequence indicates that the amount of a product (e.g., an mRNA transcript or protein) of the gene is likely to be modulated via iExon inclusion by the compound of Formula (I) or a form thereof, and the absence of the combination of an upstream branch point, an upstream 3′ splice site and an intronic REMS in the gene sequence indicates that the amount of a product (e.g., an mRNA transcript or protein) of the gene is unlikely to be modulated via iExon inclusion by the compound of Formula (I) or a form thereof. In certain embodiments, a compound of Formula (I) is a compound of Formula (II), Formula (III), Formula (IV), Formula (V), Formula (VI), Formula (VII), Formula (VIII), Formula (IX), Formula (X), Formula (XI), Formula (XII), Formula (XIII), or Formula (XIV) described herein. In specific embodiments, the methods further comprise searching for the presence of any of, in 5′ to 3′ order: an upstream branch point, an upstream 3′ splice site, an intronic REMS, a downstream 3′ splice site, and a downstream branch point in the gene sequence.

[1967] The step of searching for the presence of an upstream branch point, an upstream 3′ splice site and an intronic REMS in any of the gene sequences in any of the genes described herein can be performed by a computer system comprising a memory storing instructions for searching for the presence of the intronic REMS, the upstream 3′ splice site, and the upstream branch point in the gene sequence, or such a search can be performed manually.

[1968] In certain embodiments, the splicing of a precursor RNA containing an intronic REMS is assessed by contacting a compound described herein with the precursor RNA in cell culture. In some embodiments, the splicing of a precursor RNA containing an intronic REMS is assessed by contacting a compound described herein with the precursor RNA in a cell-free extract. In a specific embodiment, the compound is one known to modulate the splicing of a precursor RNA containing an exonic REMS. See, e.g., the section below relating to methods for determining whether a compound modulates the expression of certain genes, and the example below for techniques that could be used in these assessments.

Methods for Determining which Compounds of Formula (I) Modulate the Expression of Certain Genes

[1969] Provided herein are methods for determining whether a compound of Formula (I) or a form thereof modulates the amount of one, two, three or more RNA transcripts (e.g., pre-mRNA or mRNA transcripts or isoforms thereof) of one, two, three or more genes. In some embodiments, the gene is any one of the genes disclosed in Tables 2-7 or any one of the genes disclosed in Table 1. In certain embodiments, the gene is a gene disclosed in Tables 2-6. In some embodiments, the gene is a gene disclosed in Table 7. In other embodiments, the gene is a gene disclosed in Table 1. In certain embodiments, the gene is a gene not disclosed in either International Publication No. WO 2015/105657, International Publication No. WO 2016/196386, or both.

[1970] In one embodiment, provided herein is a method for determining whether a compound of Formula (I) or a form thereof modulates the amount of an RNA transcript, comprising: (a) contacting a cell(s) with a compound of Formula (I) or a form thereof, and (b) determining the amount of the RNA transcript produced by the cell(s), wherein an alteration in the amount of the RNA transcript in the presence of the compound relative to the amount of the RNA transcript in the absence of the compound or the presence of a negative control (e.g., a vehicle control such as PBS or DMSO) indicates that the compound of Formula (I) or a form thereof modulates the amount of the RNA transcript. In another embodiment, provided herein is a method for determining whether a compound of Formula (I) or a form thereof modulates the amount of an RNA transcript (e.g., an mRNA transcript), comprising: (a) contacting a first cell(s) with a compound of Formula (I) or a form thereof, (b) contacting a second cell(s) with a negative control (e.g., a vehicle control, such as PBS or DMSO); and (c) determining the amount of the RNA transcript produced by the first cell(s) and the second cell(s); and (d) comparing the amount of the RNA transcript produced by the first cell(s) to the amount of the RNA transcript expressed by the second cell(s), wherein an alteration in the amount of the RNA transcript produced by the first cell(s) relative to the amount of the RNA transcript produced by the second cell(s) indicates that the compound of Formula (I) or a form thereof modulates the amount of the RNA transcript. In certain embodiments, the contacting of the cell(s) with the compound occurs in cell culture. In other embodiments, the contacting of the cell(s) with the compound occurs in a subject, such as a non-human animal subject.

[1971] In another embodiment, provided herein is a method for determining whether a compound of Formula (I) or a form thereof modulates the splicing of an RNA transcript (e.g., an mRNA transcript), comprising: (a) culturing a cell(s) in the presence of a compound of Formula (I) or a form thereof; and (b) determining the amount of the two or more RNA transcript splice variants produced by the cell(s), wherein an alteration in the amount of the two or more RNA transcript in the presence of the compound relative to the amount of the two or more RNA transcript splice variants in the absence of the compound or the presence of a negative control (e.g., a vehicle control such as PBS or DMSO) indicates that the compound of Formula (I) or a form thereof modulates the splicing of the RNA transcript.

[1972] In another embodiment, provided herein is a method for determining whether a compound of Formula (I) or a form thereof modulates the splicing of an RNA transcript (e.g., an mRNA transcript), comprising: (a) culturing a cell(s) in the presence of a compound of Formula (I) or a form thereof; (b) isolating two or more RNA transcript splice variants from the cell(s) after a certain period of time; and (c) determining the amount of the two or more RNA transcript splice variants produced by the cell(s), wherein an alteration in the amount of the two or more RNA transcript in the presence of the compound relative to the amount of the two or more RNA transcript splice variants in the absence of the compound or the presence of a negative control (e.g., a vehicle control such as PBS or DMSO) indicates that the compound of Formula (I) or a form thereof modulates the splicing of the RNA transcript. In another embodiment, provided herein is a method for determining whether a compound of Formula (I) or a form thereof modulates the splicing of an RNA transcript (e.g., an mRNA transcript), comprising (a) culturing a first cell(s) in the presence of a compound of Formula (I) or a form thereof; (b) culturing a second cell(s) in the presence of a negative control (e.g., a vehicle control, such as PBS or DMSO); (c) isolating two or more RNA transcript splice variants produced by the first cell(s) and isolating two or more RNA transcript splice variants produced by the second cell(s); (d) determining the amount of the two or more RNA transcript splice variants produced by the first cell(s) and the second cell(s); and (e) comparing the amount of the two or more RNA transcript splice variants produced by the first cell(s) to the amount of the two or more RNA transcript splice variants produced by the second cell(s), wherein an alteration in the amount of the two or more RNA transcript splice variants produced by the first cell(s) relative to the amount of the two or more RNA transcript splice variants produced by the second cell(s) indicates that the compound of Formula (I) or a form thereof modulates the aplicing of the RNA transcript.

[1973] In another embodiment, provided herein is a method for determining whether a compound of Formula (I) or a form thereof modulates the amount of an RNA transcript (e.g., an mRNA transcript), comprising: (a) contacting a cell-free system with a compound of Formula (I) or a form thereof, and (b) determining the amount of the RNA transcript produced by the cell-free system, wherein an alteration in the amount of the RNA transcript in the presence of the compound relative to the amount of the RNA transcript in the absence of the compound or the presence of a negative control (e.g., a vehicle control such as PBS or DMSO) indicates that the compound of Formula (I) or a form thereof modulates the amount of the RNA transcript. In another embodiment, provided herein is a method for determining whether a compound of Formula (I) or a form thereof modulates the amount of an RNA transcript (e.g., an mRNA transcript), comprising: (a) contacting a first cell-free system with a compound of Formula (I) or a form thereof, (b) contacting a second cell-free system with a negative control (e.g., a vehicle control, such as PBS or DMSO); and (c) determining the amount of the RNA transcript produced by the first cell-free system and the second cell-free system; and (d) comparing the amount of the RNA transcript produced by the first cell-free system to the amount of the RNA transcript expressed by the second cell-free system, wherein an alteration in the amount of the RNA transcript produced by the first cell-free system relative to the amount of the RNA transcript produced by the second cell-free system indicates that the compound of Formula (I) or a form thereof modulates the amount of the RNA transcript. In certain embodiments, the cell-free system comprises purely synthetic RNA, synthetic or recombinant (purified) enzymes, and protein factors. In other embodiments, the cell-free system comprises RNA transcribed from a synthetic DNA template, synthetic or recombinant (purified) enzymes, and protein factors. In other embodiments, the cell-free system comprises purely synthetic RNA and nuclear extract. In other embodiments, the cell-free system comprises RNA transcribed from a synthetic DNA template and nuclear extract. In other embodiments, the cell-free system comprises purely synthetic RNA and whole cell extract. In other embodiments, the cell-free system comprises RNA transcribed from a synthetic DNA template and whole cell extract. In certain embodiments, the cell-free system additionally comprises regulatory RNAs (e.g., microRNAs).

[1974] In another embodiment, provided herein is a method for determining whether a compound of Formula (I) or a form thereof modulates the splicing of an RNA transcript (e.g., an mRNA transcript), comprising: (a) contacting a cell-free system with a compound of Formula (I) or a form thereof; and (b) determining the amount of two or more RNA transcript splice variants produced by the cell-free system, wherein an alteration in the amount of the two or more RNA transcript splice variants in the presence of the compound relative to the amount of the two or more RNA transcript splice variants in the absence of the compound or the presence of a negative control (e.g., a vehicle control such as PBS or DMSO) indicates that the compound of Formula (I) or a form thereof modulates the splicing of the RNA transcript. In another embodiment, provided herein is a method for determining whether a compound of Formula (I) or a form thereof modulates the splicing of an RNA transcript (e.g., an mRNA transcript), comprising: (a) contacting a first cell-free system with a compound of Formula (I) or a form thereof; (b) contacting a second cell-free system with a negative control (e.g., a vehicle control, such as PBS or DMSO); and (c) determining the amount of two or more RNA transcript splice variants produced by the first cell-free system and the second cell-free system; and (d) comparing the amount of the two or more RNA transcript splice variants produced by the first cell-free system to the amount of the RNA transcript expressed by the second cell-free system, wherein an alteration in the amount of the two or more RNA transcript splice variants produced by the first cell-free system relative to the amount of the two or more RNA transcript splice variants produced by the second cell-free system indicates that the compound of Formula (I) or a form thereof modulates the splicing of the RNA transcript. In certain embodiments, the cell-free system comprises purely synthetic RNA, synthetic or recombinant (purified) enzymes, and protein factors. In other embodiments, the cell-free system comprises RNA transcribed from a synthetic DNA template, synthetic or recombinant (purified) enzymes, and protein factors. In other embodiments, the cell-free system comprises purely synthetic RNA and nuclear extract. In other embodiments, the cell-free system comprises RNA transcribed from a synthetic DNA template and nuclear extract. In other embodiments, the cell-free system comprises purely synthetic RNA and whole cell extract. In other embodiments, the cell-free system comprises RNA transcribed from a synthetic DNA template and whole cell extract. In certain embodiments, the cell-free system additionally comprises regulatory RNAs (e.g., microRNAs).

[1975] In another embodiment, provided herein is a method for determining whether a compound of Formula (I) or a form thereof modulates the amount of an RNA transcript (e.g., an mRNA transcript), comprising: (a) culturing a cell(s) in the presence of a compound of Formula (I) or a form thereof, (b) isolating the RNA transcript from the cell(s) after a certain period of time; and (c) determining the amount of the RNA transcript produced by the cell(s), wherein an alteration in the amount of the RNA transcript in the presence of the compound relative to the amount of the RNA transcript in the absence of the compound or the presence of a negative control (e.g., a vehicle control such as PBS or DMSO) indicates that the compound of Formula (I) or a form thereof modulates the amount of the RNA transcript. In another embodiment, provided herein is a method for determining whether a compound of Formula (I) or a form thereof modulates the amount of an RNA transcript (e.g., an mRNA transcript), comprising (a) culturing a first cell(s) in the presence of a compound of Formula (I) or a form thereof, (b) culturing a second cell(s) in the presence of a negative control (e.g., a vehicle control, such as PBS or DMSO); (c) isolating the RNA transcript produced by the first cell(s) and isolating the RNA transcript produced by the second cell(s); (d) determining the amount of the RNA transcript produced by the first cell(s) and the second cell(s); and (e) comparing the amount of the RNA transcript produced by the first cell(s) to the amount of the RNA transcript produced by the second cell(s), wherein an alteration in the amount of the RNA transcript produced by the first cell(s) relative to the amount of the RNA transcript produced by the second cell(s) indicates that the compound of Formula (I) or a form thereof modulates the amount of the RNA transcript.

[1976] In certain embodiments, the cell(s) contacted or cultured with a compound of Formula (I) or a form thereof is a primary cell(s) from a subject. In some embodiments, the cell(s) contacted or cultured with a compound of Formula (I) or a form thereof is a primary cell(s) from a subject with a disease. In specific embodiments, the cell(s) contacted or cultured with a compound of Formula (I) or a form thereof is a primary cell(s) from a subject with a disease associated with an aberrant amount of an RNA transcript(s) for a particular gene(s). In some specific embodiments, the cell(s) contacted or cultured with a compound of Formula (I) or a form thereof is a primary cell(s) from a subject with a disease associated with an aberrant amount of an isoform(s) of a particular gene(s). In some embodiments, the cell(s) contacted or cultured with a compound of Formula (I) or a form thereof is a fibroblast (e.g., GM03813 or PNN 1-46 fibroblasts), an immune cell (e.g., a T cell, B cell, natural killer cell, macrophage), or a muscle cell. In certain embodiments, the cell(s) contacted or cultured with a compound of Formula (I) or a form thereof is a cancer cell.

[1977] In certain embodiments, the cell(s) contacted or cultured with a compound of Formula (I) or a form thereof is from a cell line. In some embodiments, the cell(s) contacted or cultured with a compound of Formula (I) or a form thereof is a cell line derived from a subject with a disease. In certain embodiments, the cell(s) contacted or cultured with a compound of Formula (I) or a form thereof is from a cell line known to have aberrant RNA transcript levels for a particular gene(s). In specific embodiments, the cell(s) contacted or cultured with a compound of Formula (I) or a form thereof is from a cell line derived from a subject with a disease known to have aberrant RNA transcript levels for a particular gene(s). In certain embodiments, the cell(s) contacted or cultured with a compound of Formula (I) or a form thereof is a cancer cell line. In some specific embodiments, the cell(s) contacted or cultured with the compound of Formula (I) or a form thereof is from a cell line derived from a subject with a disease known to have an aberrant amount of an RNA isoform(s) and/or protein isoform(s) of a particular gene(s). Non-limiting examples of cell lines include 3T3, 4T1, 721, 9L, A2780, A172, A20, A253, A431, A-549, ALC, B16, B35, BCP-1, BEAS-2B, bEnd.3, BHK, BR 293, BT2O, BT483, BxPC3, C2Cl2, C3H-10T1/2, C6/36, C6, Cal-27, CHO, COR-L23, COS, COV-434, CML T1, CMT, CRL7O3O, CT26, D17, DH82, DU145, DuCaP, EL4, EM2, EM3, EMT6, FM3, H1299, H69, HB54, HB55, HCA2, HDF (human dermal fibroblasts), HEK-293, HeLa, Hepa1c1c7, HL-60, HMEC, Hs578T, HsS78Bst, HT-29, HTB2, HUVEC, Jurkat, J558L, JY, K562, Ku812, KCL22, KG1, KYO1, LNCap, Ma-Mel, MC-38, MCF-7, MCF-10A, MDA-MB-231, MDA-MB-468, MDA-MB-435, MDCK, MG63, MOR/0.2R, MONO-MAC 6, MRC5, MTD-1A, NCI-H69, NIH-3T3, NALM-1, NS0, NW-145, OPCN, OPCT, PNT-1A, PNT-2, Raji, RBL, RenCa, RIN-5F, RMA, Saos-2, Sf21, Sf9, SH-SY5Y, SiHa, SKBR3, SKOV-3, T2, T-47D, T84, THP1, U373, U87, U937, VCaP, Vero, VERY, W138, WM39, WT-49, X63, YAC-1, and YAR cells. In one embodiment, the cells are from a patient. In another embodiment, the patient cells are GM03813 cells.

[1978] In another embodiment, provided herein is a method for determining whether a compound of Formula (I) or a form thereof modulates the amount of an RNA transcript (e.g., an mRNA transcript), comprising: (a) contacting a tissue sample with a compound of Formula (I) or a form thereof; and (b) determining the amount of the RNA transcript produced by the tissue sample, wherein an alteration in the amount of the RNA transcript in the presence of the compound relative to the amount of the RNA transcript in the absence of the compound or the presence of a negative control (e.g., a vehicle control such as PBS or DMSO) indicates that the compound of Formula (I) or a form thereof modulates the amount of the RNA transcript. In another embodiment, provided herein is a method for determining whether a compound of Formula (I) or a form thereof modulates the amount of an RNA transcript (e.g., an mRNA transcript), comprising: (a) contacting a first tissue sample with a compound of Formula (I) or a form thereof, (b) contacting a second tissue sample with a negative control (e.g., a vehicle control, such as PBS or DMSO); and (c) determining the amount of the RNA transcript produced by the first tissue sample and the second tissue sample; and (d) comparing the amount of the RNA transcript produced by the first tissue sample to the amount of the RNA transcript produced by the second tissue sample, wherein an alteration in the amount of the RNA transcript produced by the first tissue sample relative to the amount of the RNA transcript produced by the second tissue sample indicates that the compound of Formula (I) or a form thereof modulates the amount of the RNA transcript. Any tissue sample containing cells may be used in the accordance with these methods. In certain embodiments, the tissue sample is a blood sample, a skin sample, a muscle sample, or a tumor sample. Techniques known to one skilled in the art may be used to obtain a tissue sample from a subject.

[1979] In some embodiments, a dose-response assay is performed. In one embodiment, the dose response assay comprises: (a) contacting a cell(s) with a concentration of a compound of Formula (I) or a form thereof; (b) determining the amount of the RNA transcript produced by the cell(s), wherein an alteration in the amount of the RNA transcript in the presence of the compound relative to the amount of the RNA transcript in the absence of the compound or the presence of a negative control (e.g., a vehicle control such as PBS or DMSO) indicates that the compound of Formula (I) or a form thereof modulates the amount of the RNA transcript; (c) repeating steps (a) and (b), wherein the only experimental variable changed is the concentration of the compound or a form thereof; and (d) comparing the amount of the RNA transcript produced at the different concentrations of the compound or a form thereof. In another embodiment, the dose response assay comprises: (a) culturing a cell(s) in the presence of a compound of Formula (I) or a form thereof, (b) isolating the RNA transcript from the cell(s) after a certain period of time; (c) determining the amount of the RNA transcript produced by the cell(s), wherein an alteration in the amount of the RNA transcript in the presence of the compound relative to the amount of the RNA transcript in the absence of the compound or the presence of a negative control (e.g., a vehicle control such as PBS or DMSO) indicates that the compound of Formula (I) or a form thereof modulates the amount of the RNA transcript; (d) repeating steps (a), (b), and (c), wherein the only experimental variable changed is the concentration of the compound or a form thereof; and (e) comparing the amount of the RNA transcript produced at the different concentrations of the compound or a form thereof. In another embodiment, the dose-response assay comprises: (a) contacting each well of a microtiter plate containing cells with a different concentration of a compound of Formula (I) or a form thereof; (b) determining the amount of an RNA transcript produced by cells in each well; and (c) assessing the change of the amount of the RNA transcript at the different concentrations of the compound or form thereof.

[1980] In one embodiment, the dose response assay comprises: (a) contacting a cell(s) with a concentration of a compound of Formula (I) or a form thereof, wherein the cells are within the wells of a tissue culture container (e.g., a 96-well plate) at about the same density within each well, and wherein the cells are contacted with different concentrations of compound in different wells; (b) isolating the RNA from said cells in each well; (c) determining the amount of the RNA transcript produced by the cell(s) in each well; and (d) assessing change in the amount of the RNA transcript in the presence of one or more concentrations of compound relative to the amount of the RNA transcript in the presence of a different concentration of the compound or the absence of the compound or the presence of a negative control (e.g., a vehicle control such as PBS or DMSO).

[1981] In certain embodiments, the contacting of the cell(s) with the compound occurs in cell culture. In other embodiments, the contacting of the cell(s) with the compound occurs in a subject, such as a non-human animal subject.

[1982] In certain embodiments described herein, the cell(s) is contacted or cultured with a compound of Formula (I) or a form thereof, or a tissue sample is contacted with a compound of Formula (I) or a form thereof, or a negative control for a period of 15 minutes, 30 minutes, 45 minutes, 1 hour, 2 hours, 3 hours, 4 hours, 5 hours, 6 hours, 8 hours, 12 hours, 18 hours, 24 hours, 48 hours, 72 hours or more. In other embodiments described herein, the cell(s) is contacted or cultured with a compound of Formula (T) or a form thereof, or a tissue sample is contacted with a compound of Formula (I) or a form thereof, or a negative control for a period of 15 minutes to 1 hour, 1 to 2 hours, 2 to 4 hours, 6 to 12 hours, 12 to 18 hours, 12 to 24 hours, 28 to 24 hours, 24 to 48 hours, 48 to 72 hours.

[1983] In certain embodiments described herein, the cell(s) is contacted or cultured with a certain concentration of a compound of Formula (I) or a form thereof, or a tissue sample is contacted with a certain concentration of a compound of Formula (I) or a form thereof, wherein the certain concentration is 0.0001 μM, 0.0003 μM, 0.001 μM, 0.003 μM, 0.01 μM, 0.05 μM, 1 μM, 2 μM, 5 μM, 10 μM, 15 μM, 20 μM, 25 μM, 50 μM, 75 μM, 100 μM, or 150 μM. In other embodiments described herein, the cell(s) is contacted or cultured with a certain concentration of a compound of Formula (I) or a form thereof, or a tissue sample is contacted with a certain concentration of a compound of Formula (I) or a form thereof, wherein the certain concentration is 0.0001 μM, 0.0003 μM, 0.0005 μM, 0.001 μM, 0.003 μM, 0.005 μM, 0.01 μM, 0.03 μM, 0.05 μM, 0.1 μM, 0.3 μM, 0.5 μM or 1 μM. In other embodiments described herein, the cell(s) is contacted or cultured with a certain concentration of a compound of Formula (I) or a form thereof, or a tissue sample is contacted with a certain concentration of a compound of Formula (I) or a form thereof, wherein the certain concentration is 175 μM, 200 μM, 250 μM, 275 μM, 300 μM, 350 μM, 400 μM, 450 μM, 500 μM, 550 μM 600 μM, 650 μM, 700 μM, 750 μM, 800 μM, 850 μM, 900 μM, 950 μM or 1 mM. In some embodiments described herein, the cell(s) is contacted or cultured with a certain concentration of a compound of Formula (I) or a form thereof, or a tissue sample is contacted with a certain concentration of a compound of Formula (I) or a form thereof, wherein the certain concentration is 5 nM, 10 nM, 20 nM, 30 nM, 40 nM, 50 nM, 60 nM, 70 nM, 80 nM, 90 nM, 100 nM, 150 nM, 200 nM, 250 nM, 300 nM, 350 nM, 400 nM, 450 nM, 500 nM, 550 nM, 600 nM, 650 nM, 700 nM, 750 nM, 800 nM, 850 nM, 900 nM, or 950 nM. In certain embodiments described herein, the cell(s) is contacted or cultured with a certain concentration of a compound of Formula (I) or a form thereof, or a tissue sample is contacted with a certain concentration of a compound of Formula (I) or a form thereof, wherein the certain concentration is between 0.0001 μM to 0.001 μM, 0.0001 μM to 0.01 μM, 0.0003 μM to 0.001 μM, 0.0003 μM to 0.01 μM, 0.001 μM to 0.01 μM, 0.003 μM to 0.01 μM, 0.01 μM to 0.1 μM, 0.1 μM to 1 μM, 1 μM to 50 μM, 50 μM to 100 μM, 100 μM to 500 μM, 500 μM to 1 nM, 1 nM to 10 nM, 10 nM to 50 nM, 50 nM to 100 nM, 100 nM to 500 nM, 500 nM to 1000 nM.

[1984] In another embodiment, provided herein is a method for determining whether a compound of Formula (I) or a form thereof modulates the amount of an RNA transcript (e.g., an mRNA transcript), comprising: (a) administering a compound of Formula (I) or a form thereof to a subject (in certain embodiments, a non-human animal); and (b) determining the amount of the RNA transcript in a sample obtained from the subject, wherein an alteration in the amount of the RNA transcript measured in the sample from the subject administered the compound or form thereof relative to the amount of the RNA transcript in a sample from the subject prior to administration of the compound or form thereof or a sample from a different subject from the same species not administered the compound or form thereof indicates that the compound of Formula (I) or a form thereof modulates the amount of the RNA transcript. In another embodiment, provided herein is a method for determining whether a compound of Formula (I) or a form thereof modulates the amount of an RNA transcript (e.g., an mRNA transcript), comprising: (a) administering a compound of Formula (I) or a form thereof to a first subject (in certain embodiments, a non-human animal); (b) administering a negative control (e.g., a pharmaceutical carrier) to a second subject (in certain embodiments, a non-human animal) of the same species as the first subject; and (c) determining the amount of the RNA transcript in a first tissue sample from the first subject and the amount of the RNA transcript in the second tissue sample from the second subject; and (d) comparing the amount of the RNA transcript in the first tissue sample to the amount of the RNA transcript in the second tissue sample, wherein an alteration in the amount of the RNA transcript in the first tissue sample relative to the amount of the RNA transcript in the second tissue sample indicates that the compound of Formula (I) or a form thereof modulates the amount of the RNA transcript. In certain embodiments, a compound of Formula (I) or form thereof is administered to a subject at a dose of about 0.001 mg/kg/day to about 500 mg/kg/day. In some embodiments, a single dose of a compound of Formula (I) or a form thereof is administered to a subject in accordance with the methods described herein. In other embodiments, 2, 3, 4, 5 or more doses of a compound of Formula (I) is administered to a subject in accordance with the methods described herein. In specific embodiments, the compound of Formula (I) or a form thereof is administered in a subject in a pharmaceutically acceptable carrier, excipient or diluent.

[1985] In another embodiment, provided herein is a method for determining whether a compound of Formula (I) or a form thereof modulates the splicing of an RNA transcript (e.g., an mRNA transcript), comprising: (a) administering a compound of Formula (I) or a form thereof to a subject (in certain embodiments, a non-human animal); and (b) determining the amount of two or more RNA transcript splice variants in a sample obtained from the subject, wherein an alteration in the amount of the two or more RNA transcript splice variants measured in the sample from the subject administered the compound or form thereof relative to the amount of the two or more RNA transcript splice variants in a sample from the subject prior to administration of the compound or form thereof or a sample from a different subject from the same species not administered the compound or form thereof indicates that the compound of Formula (I) or a form thereof modulates the splicing of the RNA transcript. In another embodiment, provided herein is a method for determining whether a compound of Formula (I) or a form thereof modulates the splicing of an RNA transcript (e.g., an mRNA transcript), comprising: (a) administering a compound of Formula (I) or a form thereof to a first subject (in certain embodiments, a non-human animal); (b) administering a negative control (e.g., a pharmaceutical carrier) to a second subject (in certain embodiments, a non-human animal) of the same species as the first subject; and (c) determining the amount of two or more RNA transcript splice variants in a first tissue sample from the first subject and the amount of two or more RNA transcript splice variants in the second tissue sample from the second subject; and (d) comparing the amount of the two or more RNA transcript splice variants in the first tissue sample to the amount of the two or more RNA transcript splice variants in the second tissue sample, wherein an alteration in the amount of the two or more RNA transcript splice variants in the first tissue sample relative to the amount of the two or more RNA transcript splice variants in the second tissue sample indicates that the compound of Formula (I) or a form thereof modulates the splicing of the RNA transcript. In certain embodiments, a compound of Formula (I) or form thereof is administered to a subject at a dose of about 0.001 mg/kg/day to about 500 mg/kg/day. In some embodiments, a single dose of a compound of Formula (I) or a form thereof is administered to a subject in accordance with the methods described herein. In other embodiments, 2, 3, 4, 5 or more doses of a compound of Formula (I) is administered to a subject in accordance with the methods described herein. In specific embodiments, the compound of Formula (I) or a form thereof is administered in a subject in a pharmaceutically acceptable carrier, excipient or diluent.

[1986] In some embodiments, the compound of Formula (I) or a form thereof that is contacted or cultured with a cell(s) or a tissue sample, or administered to a subject is a compound of Formula (II), Formula (III), Formula (IV), Formula (V), Formula (VI), Formula (VII), Formula (VIII), Formula (IX), Formula (X), Formula (XI), Formula (XII), Formula (XIII), or Formula (XIV). In some embodiments, the compound of Formula (I) or a form thereof that is contacted or cultured with a cell(s) or a tissue sample, or administered to a subject is a compound described herein.

[1987] Techniques known to one skilled in the art may be used to determine the amount of an RNA transcript(s). In some embodiments, the amount of one, two, three or more RNA transcripts is measured using deep sequencing, such as ILLUMINA® RNASeq, ILLUMINA® next generation sequencing (NGS), ION TORRENT™ RNA next generation sequencing, 454™ pyrosequencing, or Sequencing by Oligo Ligation Detection (SOLID™). In other embodiments, the amount of multiple RNA transcripts is measured using an exon array, such as the GENECHIP® human exon array. In certain embodiments, the amount of one, two, three or more RNA transcripts is determined by RT-PCR. In other embodiments, the amount of one, two, three or more RNA transcripts is measured by RT-qPCR or digital color-coded barcode technology. Techniques for conducting these assays are known to one skilled in the art.

[1988] In some embodiments, analysis is performed on data derived from the assay to measure the magnitude of splicing to determine the amount of exons spliced into an mRNA transcript that is produced in the presence of the compound relative to the amount in the absence of the compound or presence of a negative control. In a preferred embodiment, the method utilized is calculation of change in Percent Spliced In (APSI). The method utilizes read data from RNAseq (or any other method that can distinguish mRNA splice isoforms) to calculate the ratio (percentage) between reads that either demonstrate inclusion (junctions between the upstream exon and the exon of interest) or exclusion (junction between the upstream and downstream exons, excluding the exon of interest), to demonstrate whether the presence of the compound affects the amount of exon inclusion relative to the amount of inclusion in the absence of the compound or the presence of a negative control.

[1989] The APSI value is derived from the formula:

ΔPSI (%)={(a+b)/2/[(a+b)/2+c]}^{C}−{(a+b)/2/[(a+b)/2+c]}^{U}×100

[1990] Where “U” represents the value for probability of iExon inclusion (a+b)/2/[(a+b)/2+c]^{U} in the absence of the compound; and, where “C” represents the value for probability of iExon inclusion (a+b)/2/[(a+b)/2+c]^{C} in the presence of the compound. The values for “a” and “b” represent the number of reads supporting inclusion of an iExon in an RNA transcript. In other words, the “a” value is derived from the amount of reads for a first intronic nucleotide sequence comprising, in 5′ to 3′ order: a first exon having a 5′ splice site operably linked and upstream from a first intronic nucleotide sequence comprising a first branch point further operably linked and upstream from a first intronic 3′ splice site (upstream of the nascent iExon). The “b” value is derived from the amount of reads for a second intronic nucleotide sequence comprising, in 5′ to 3′ order: an iREMS sequence operably linked downstream from the first intronic 3′ splice site and upstream from a second intronic nucleotide sequence comprising a second branch point further operably linked and upstream from a second intronic 3′ splice site of a second exon. The value for “c” represents the number of reads supporting exclusion of an iExon. Accordingly, when a compound enables the splicing machinery to recognize a nascent iExon, the value for (a+b)/2/[(a+b)/2+c]^{C} in the presence of the splicing modifier compound will differ from the value for (a+b)/2/[(a+b)/2+c]^{U} in the absence of the compound. The statistically significant value for the likelihood of iExon inclusion may be obtained according to statistical analysis methods or other probability analysis methods known to those of ordinary skill in the art.

[1991] In some embodiments, a statistical analysis or other probability analysis is performed on data from the assay utilized to measure an RNA transcript. In certain embodiments, for example, a Fisher's Exact Test statistical analysis is performed by comparing the total number of reads for the inclusion and exclusion of an iExon (or region) based on data from one or more assays used to measure whether the amount of an RNA transcript is altered in the presence of the compound relative to the amount in the absence of the compound or presence of a negative control. In specific embodiments, the statistical analysis results in a confidence value for those RNA transcripts with the alternation of 10%, 5%, 4%, 3%, 2%, 1%, 0.5%, 0.1%, 0.01%, 0.001% or 0.0001%. In some specific embodiments, the confidence value is a p value of those altered RNA transcripts of is 10%, 5%, 4%, 3%, 2%, 1%, 0.5%, 0.1%, 0.01%, 0.001% or 0.0001%. In certain specific embodiments, an exact test, student t-test or p value of those RNA transcripts with the alteration is 10%, 5%, 4%, 3%, 2%, 1%, 0.5% or 0.1% and 10%, 5%, 4%, 3%, 2%, 1%, 0.5%, 0.1%, 0.01%, 0.001% or 0.0001%, respectively.

[1992] In certain embodiments, a further analysis is performed to determine how the compound of Formula (I) or a form thereof is changing the amount of an RNA transcript(s). In specific embodiments, a further analysis is performed to determine if an alternation in the amount of an RNA transcript(s) in the presence of a compound of Formula (I) or a form thereof relative the amount of the RNA transcript(s) in the absence of the compound or a form thereof, or the presence of a negative control is due to changes in transcription, splicing, and/or stability of the RNA transcript(s). Techniques known to one skilled in the art may be used to determine whether a compound of Formula (I) or a form thereof changes, e.g., the transcription, splicing and/or stability of an RNA transcript(s).

[1993] In certain embodiments, the stability of one or more RNA transcripts is determined by serial analysis of gene expression (SAGE), differential display analysis (DD), RNA arbitrary primer (RAP)-PCR, restriction endonuclease-lytic analysis of differentially expressed sequences (READS), amplified restriction fragment-length polymorphism (ALFP), total gene expression analysis (TOGA), RT-PCR, RT-qPCR, RNA-Seq, digital color-coded barcode technology, high-density cDNA filter hybridization analysis (HDFCA), suppression subtractive hybridization (SSH), differential screening (DS), cDNA arrays, oligonucleotide chips, or tissue microarrays. In other embodiments, the stability of one or more RNA transcripts is determined by Northern blot, RNase protection, or slot blot.

[1994] In some embodiments, the transcription in a cell(s) or tissue sample is inhibited before (e.g., 5 minutes, 10 minutes, 30 minutes, 1 hour, 2 hours, 4 hours, 6 hours, 8 hours, 12 hours, 18 hours, 24 hours, 36 hours, 48 hours, or 72 hours before) or after (e.g., 5 minutes, 10 minutes, 30 minutes, 1 hour, 2 hours, 4 hours, 6 hours, 8 hours, 12 hours, 18 hours, 24 hours, 36 hours, 48 hours, or 72 hours after) the cell or the tissue sample is contacted or cultured with an inhibitor of transcription, such as α-amanitin, DRB, flavopiridol, triptolide, or actinomycin-D. In other embodiments, the transcription in a cell(s) or tissue sample is inhibited with an inhibitor of transcription, such as α-amanitin, DRB, flavopiridol, triptolide, or actinomycin-D, while the cell(s) or tissue sample is contacted or cultured with a compound of Formula (I) or a form thereof.

[1995] In certain embodiments, the level of transcription of one or more RNA transcripts is determined by nuclear run-on assay or an in vitro transcription initiation and elongation assay. In some embodiments, the detection of transcription is based on measuring radioactivity or fluorescence. In some embodiments, a PCR-based amplification step is used. In specific embodiments, the amount of alternatively spliced forms of the RNA transcripts of a particular gene are measured to see if there is an alteration in the amount of one, two or more alternatively spliced forms of the RNA transcripts of the gene. In some embodiments, the amount of an isoform(s) encoded by a particular gene is measured to see if there is an alteration in the amount of the isoform(s). In certain embodiments, the levels of spliced forms of RNA are quantified by RT-PCR, RT-qPCR, RNA-Seq, digital color-coded barcode technology, or Northern blot. In other embodiments, sequence-specific techniques may be used to detect the levels of an individual splice form. In certain embodiments, splicing is measured in vitro using nuclear extracts. In some embodiments, detection is based on measuring radioactivity or fluorescence. Techniques known to one skilled in the art may be used to measure alterations in the amount of alternatively spliced forms of an RNA transcript of a gene and alterations in the amount of an isoform encoded by a gene. In a specific embodiment, modulation of RNA transcripts is assessed as described in the Examples described herein.

[1996] Also provided herein are methods of screening for new compounds that can be used to modulate the amount of a product (e.g., a precursor RNA, an mRNA, or protein) of a gene comprising an intronic REMS in its DNA or RNA sequence. The methods described above in this section with respect to determining whether the amount of a product (e.g., a precursor RNA, an mRNA, or protein) of a gene is likely to be modulated by a compound of Formula (I) or a form thereof can be also used in the methods of screening for new compounds. In a specific embodiment, the method comprises contacting a candidate compound with an RNA transcript, wherein the RNA transcript comprises exons and one or more introns, wherein at least one intron comprises, in 5′ to 3′ order, a branch point, a 3′ splice site, and an intronic REMS. In another specific embodiment, the method comprises contacting a candidate compound with an RNA transcript, wherein the RNA transcript comprises exons and one or more introns, wherein at least one intron comprises an intronic REMS downstream of a branch point and a 3′ splice site. The RNA transcript may be present in a cell or cell lysate. The methods described above regarding the techniques of contacting a compound with an RNA transcript, the dosage, etc., may be used in the methods of screening. The candidate compounds to be screened can be provided by any source. For example, the candidate compounds to be screened can be from a compound library, such as a commercial compound library.

### Pharmaceutical Compositions and Modes of Administration

[1997] When administered to a patient, a compound of Formula (I) or a form thereof is preferably administered as a component of a composition that optionally comprises a pharmaceutically acceptable carrier, excipient or diluent. The composition can be administered orally, or by any other convenient route, for example, by infusion or bolus injection, by absorption through epithelial or mucocutaneous linings (e.g., oral mucosa, rectal, and intestinal mucosa) and may be administered together with another biologically active agent. Administration can be systemic or local. Various delivery systems are known, e.g., encapsulation in liposomes, microparticles, microcapsules, capsules, and can be used to administer the compound.

[1998] Methods of administration include, but are not limited to, parenteral, intradermal, intramuscular, intraperitoneal, intravenous, subcutaneous, intranasal, epidural, oral, sublingual, intranasal, intraocular, intratumoral, intracerebral, intravaginal, transdermal, ocularly, rectally, by inhalation, or topically, particularly to the ears, nose, eyes, or skin. The mode of administration is left to the discretion of the practitioner. In most instances, administration will result in the release of a compound into the bloodstream, tissue or cell(s). In a specific embodiment, a compound is administered orally.

[1999] The amount of a compound of Formula (I) or a form thereof that will be effective in the treatment of a disease resulting from an aberrant amount of mRNA transcripts depends, e.g., on the route of administration, the disease being treated, the general health of the subject, ethnicity, age, weight, and gender of the subject, diet, time, and the severity of disease progress, and should be decided according to the judgment of the practitioner and each patient's or subject's circumstances.

[2000] In specific embodiments, an “effective amount” in the context of the administration of a compound of Formula (I) or a form thereof, or composition or medicament thereof refers to an amount of a compound of Formula (I) or a form thereof to a patient which has a therapeutic effect and/or beneficial effect. In certain specific embodiments, an “effective amount” in the context of the administration of a compound of Formula (I) or a form thereof, or composition or medicament thereof to a patient results in one, two or more of the following effects: (i) reduces or ameliorates the severity of a disease; (ii) delays onset of a disease; (iii) inhibits the progression of a disease; (iv) reduces hospitalization of a subject; (v) reduces hospitalization length for a subject; (vi) increases the survival of a subject; (vii) improves the quality of life of a subject; (viii) reduces the number of symptoms associated with a disease; (ix) reduces or ameliorates the severity of a symptom(s) associated with a disease; (x) reduces the duration of a symptom associated with a disease associated; (xi) prevents the recurrence of a symptom associated with a disease; (xii) inhibits the development or onset of a symptom of a disease; and/or (xiii) inhibits of the progression of a symptom associated with a disease. In certain embodiments, an effective amount of a compound of Formula (I) or a form thereof is an amount effective to restore the amount of a RNA transcript of a gene to the amount of the RNA transcript detectable in healthy patients or cells from healthy patients. In other embodiments, an effective amount of a compound of Formula (I) or a form thereof is an amount effective to restore the amount an RNA isoform and/or protein isoform of gene to the amount of the RNA isoform and/or protein isoform detectable in healthy patients or cells from healthy patients.

[2001] In certain embodiments, an effective amount of a compound of Formula (I) or a form thereof is an amount effective to decrease the aberrant amount of an RNA transcript of a gene which associated with a disease. In certain embodiments, an effective amount of a compound of Formula (I) or a form thereof is an amount effective to decrease the amount of the aberrant expression of an isoform of a gene. In some embodiments, an effective amount of a compound of Formula (I) or a form thereof is an amount effective to result in a substantial change in the amount of an RNA transcript (e.g., mRNA transcript), alternative splice variant or isoform.

[2002] In certain embodiments, an effective amount of a compound of Formula (I) or a form thereof is an amount effective to increase or decrease the amount of an RNA transcript (e.g., an mRNA transcript) of gene which is beneficial for the prevention and/or treatment of a disease. In certain embodiments, an effective amount of a compound of Formula (I) or a form thereof is an amount effective to increase or decrease the amount of an alternative splice variant of an RNA transcript of gene which is beneficial for the prevention and/or treatment of a disease. In certain embodiments, an effective amount of a compound of Formula (I) or a form thereof is an amount effective to increase or decrease the amount of an isoform of gene which is beneficial for the prevention and/or treatment of a disease. Non-limiting examples of effective amounts of a compound of Formula (I) or a form thereof are described herein.

[2003] For example, the effective amount may be the amount required to prevent and/or treat a disease associated with the aberrant amount of an mRNA transcript of gene in a human subject.

[2004] In general, the effective amount will be in a range of from about 0.001 mg/kg/day to about 500 mg/kg/day for a patient having a weight in a range of between about 1 kg to about 200 kg. The typical adult subject is expected to have a median weight in a range of between about 70 and about 100 kg.

[2005] Within the scope of the present description, the “effective amount” of a compound of Formula (I) or a form thereof for use in the manufacture of a medicament, the preparation of a pharmaceutical kit or in a method for preventing and/or treating a disease in a human subject in need thereof, is intended to include an amount in a range of from about 0.001 mg to about 35,000 mg.

[2006] The compositions described herein are formulated for administration to the subject via any drug delivery route known in the art. Non-limiting examples include oral, ocular, rectal, buccal, topical, nasal, ophthalmic, subcutaneous, intramuscular, intraveneous (bolus and infusion), intracerebral, transdermal, and pulmonary routes of administration.

[2007] Embodiments described herein include the use of a compound of Formula (I) or a form thereof in a pharmaceutical composition. In a specific embodiment, described herein is the use of a compound of Formula (I) or a form thereof in a pharmaceutical composition for preventing and/or treating a disease in a human subject in need thereof comprising administering an effective amount of a compound of Formula (I) or a form thereof in admixture with a pharmaceutically acceptable carrier, excipient or diluent. In a specific embodiment, the human subject is a patient with a disease associated with the aberrant amount of an mRNA transcript(s).

[2008] A compound of Formula (I) or a form thereof may optionally be in the form of a composition comprising the compound or a form thereof and an optional carrier, excipient or diluent. Other embodiments provided herein include pharmaceutical compositions comprising an effective amount of a compound of Formula (I) or a form thereof and a pharmaceutically acceptable carrier, excipient, or diluent. In a specific embodiment, the pharmaceutical compositions are suitable for veterinary and/or human administration. The pharmaceutical compositions provided herein can be in any form that allows for the composition to be administered to a subject.

[2009] In a specific embodiment and in this context, the term “pharmaceutically acceptable carrier, excipient or diluent” means a carrier, excipient or diluent approved by a regulatory agency of the Federal or a state government or listed in the U.S. Pharmacopeia or other generally recognized pharmacopeia for use in animals, and more particularly in humans. The term “carrier” refers to a diluent, adjuvant (e.g., Freund's adjuvant (complete and incomplete)), excipient, or vehicle with which a therapeutic agent is administered. Such pharmaceutical carriers can be sterile liquids, such as water and oils, including those of petroleum, animal, vegetable or synthetic origin, such as peanut oil, soybean oil, mineral oil, sesame oil and the like. Water is a specific carrier for intravenously administered pharmaceutical compositions. Saline solutions and aqueous dextrose and glycerol solutions can also be employed as liquid carriers, particularly for injectable solutions.

[2010] Typical compositions and dosage forms comprise one or more excipients. Suitable excipients are well-known to those skilled in the art of pharmacy, and non limiting examples of suitable excipients include starch, glucose, lactose, sucrose, gelatin, malt, rice, flour, chalk, silica gel, sodium stearate, glycerol monostearate, talc, sodium chloride, dried skim milk, glycerol, propylene, glycol, water, ethanol and the like. Whether a particular excipient is suitable for incorporation into a pharmaceutical composition or dosage form depends on a variety of factors well known in the art including, but not limited to, the way in which the dosage form will be administered to a patient and the specific active ingredients in the dosage form. Further provided herein are anhydrous pharmaceutical compositions and dosage forms comprising one or more compounds of Formula (I) or a form thereof as described herein. The compositions and single unit dosage forms can take the form of solutions or syrups (optionally with a flavoring agent), suspensions (optionally with a flavoring agent), emulsions, tablets (e.g., chewable tablets), pills, capsules, granules, powder (optionally for reconstitution), taste-masked or sustained-release formulations and the like.

[2011] Pharmaceutical compositions provided herein that are suitable for oral administration can be presented as discrete dosage forms, such as, but are not limited to, tablets, caplets, capsules, granules, powder, and liquids. Such dosage forms contain predetermined amounts of active ingredients, and may be prepared by methods of pharmacy well known to those skilled in the art.

[2012] Examples of excipients that can be used in oral dosage forms provided herein include, but are not limited to, binders, fillers, disintegrants, and lubricants.

### Methods of Modulating the Amount of RNA Transcripts Encoded by Certain Genes

[2013] In one aspect, described herein are methods for modulating the amount of a product of a gene, wherein a precursor RNA transcript transcribed from the gene contains an intronic REMS, and the methods utilize a compound described herein. In certain embodiments, the gene contains a nucleotide sequence encoding an endogenous intronic REMS. In a specific embodiment, the precursor RNA transcript further contains a branch point and a 3′ splice site upstream from the intronic REMS. In certain embodiments, the gene is any one of the genes disclosed in Tables 2-7 or 1. In certain embodiments, the gene contains a nucleotide sequence encoding a non-endogenous intronic REMS. In one embodiment, provided herein are methods for modulating the amount of one, two, three or more RNA transcripts of a gene, by way of nonlimiting example, disclosed in Tables 2-7 or 1, infra, the method comprising contacting a cell with a compound of Formula (I) or a form thereof.

[2014] In another embodiment, provided herein is a method for modulating the amount of a product of a gene (such as an RNA transcript or a protein), wherein the gene comprises a DNA nucleotide sequence encoding two exons and an intron, wherein the nucleotide sequence encoding one exon is upstream of the nucleotide sequence encoding the intron and the nucleotide sequence encoding the other exon is downstream of the nucleotide sequence encoding the intron, wherein the DNA nucleotide sequence encoding the intron comprises in 5′ to 3′ order: a nucleotide sequence encoding a first 5′ splice site, a nucleotide sequence encoding a first branch point, a nucleotide sequence encoding a first 3′ splice site, an iREMS, a nucleotide sequence encoding a second branch point and a nucleotide sequence encoding a second 3′ splice site, wherein the iREMS comprises a DNA sequence GAgtrngn (SEQ ID NO: 4), and wherein r is adenine or guanine and n is any nucleotide, the method comprising contacting a cell with a compound described herein (for example, a compound of Formula (I) or a form thereof).

[2015] In another embodiment, provided herein is a method for modulating the amount of a product of a gene (such as an RNA transcript or protein), wherein the gene comprises a DNA nucleotide sequence encoding two exons and an intron, wherein the nucleotide sequence encoding one exon is upstream of the nucleotide sequence encoding the intron and the nucleotide sequence encoding the other exon is downstream of the nucleotide sequence encoding the intron, wherein the DNA nucleotide sequence of the intron comprises in 5′ to 3′ order: an iREMS, a nucleotide sequence encoding a first branch point and a nucleotide sequence encoding a first 3′ splice site, wherein the iREMS comprises a DNA sequence GAgtrngn (SEQ ID NO: 4), and wherein r is adenine or guanine and n is any nucleotide, the method comprising contacting a cell with a compound described herein (for example, a compound of Formula (I) or a form thereof).

[2016] In another embodiment, provided herein is a method for modulating the amount of a product of a gene (such as an RNA transcript or protein), wherein the gene comprises a DNA nucleotide sequence encoding two exons and an intron, and wherein the DNA nucleotide sequence comprises exonic and intronic elements illustrated in FIG. 1A, the method comprising contacting a cell with a compound described herein.

[2017] In another embodiment, provided herein is a method for modulating the amount of a product of a gene (such as an RNA transcript or protein), wherein the gene comprises a DNA nucleotide sequence encoding two exons and an intron, and wherein the DNA nucleotide sequence comprises exonic and intronic elements illustrated in FIG. 1B, the method comprising contacting a cell with a compound described herein.

[2018] In another embodiment, provided herein is a method for modulating the amount of a product of a gene (such as an RNA transcript or protein), wherein the gene comprises a DNA nucleotide sequence encoding two exons and an intron, and wherein the DNA nucleotide sequence comprises exonic and intronic elements illustrated in FIG. 1C, the method comprising contacting a cell with a compound described herein.

[2019] In a specific embodiment, the gene is a gene described in a table in this disclosure.

[2020] In another embodiment, provided herein are methods for modulating the amount of one, two, three or more RNA transcripts of a gene, disclosed in Tables 2-7, infra, wherein the precursor transcript transcribed from the gene comprises an intronic REMS, the method comprising contacting a cell with a compound of Formula (I) or a form thereof.

[2021] In another embodiment, provided herein are methods for modulating the amount of one, two, three or more RNA transcripts of a gene, disclosed in International Patent Application No. PCT/US2014/071252 (International Publication No. WO 2015/105657), wherein the precursor transcript transcribed from the gene comprises an intronic REMS, the method comprising contacting a cell with a compound of Formula (I) or a form thereof. In another embodiment, provided herein are methods for modulating the amount of one, two, three or more RNA transcripts of a gene, disclosed in International Patent Application No. PCT/US2016/034864 (International Publication No. WO 2016/196386), wherein the precursor transcript transcribed from the gene comprises an intronic REMS, the method comprising contacting a cell with a compound of Formula (I) or a form thereof. In a specific embodiment, the precursor RNA transcript further contains a branch point and a 3′ splice site upstream from the intronic REMS.

[2022] In certain embodiments, the gene is a gene not disclosed in either International Publication No. WO 2015/105657, International Publication No. WO 2016/196386, or both.

[2023] In another embodiment, provided herein are methods for modulating the amount of one, two, three or more RNA transcripts of a gene, disclosed in Table 1, infra, wherein the precursor transcript transcribed from the gene comprises an intronic REMS, the method comprising contacting a cell with a compound of Formula (I) or a form thereof. In a specific embodiment, the precursor RNA transcript further contains a branch point and a 3′ splice site upstream from the intronic REMS.

[2024] In another embodiment, provided herein are methods for modulating the amount of one, two, three or more RNA transcripts of a gene, disclosed in Table 7, infra, comprising contacting a cell with a compound of Formula (I) or a form thereof. See the example section for additional information regarding the genes in Table 7. In certain embodiments, the cell is contacted with the compound of Formula (I) or a form thereof in a cell culture. In other embodiments, the cell is contacted with the compound of Formula (I) or a form thereof in a subject (e.g., a non-human animal subject or a human subject). In a specific embodiment, the RNA transcript contains in 5′ to 3′ order: a branch point, a 3′ splice site and an intronic REMS.

[2025] In one aspect, provided herein is a method for producing a mature mRNA transcript comprising iExon from a pre-mRNA transcript, wherein the pre-mRNA transcript comprises two exons and an intron, wherein one exon is upstream of the intron and the other exon is downstream of the intron, wherein the intron comprises in 5′ to 3′ order: a first 5′ splice site, a first branch point, a first 3′ splice site, an endogenous or non-endogenous intronic recognition element for splicing modifier (iREMS), a second branch point, and a second 3′ splice site, wherein the iREMS comprises an RNA sequence GAgurngn (SEQ ID NO: 2), wherein r is adenine or guanine and n is any nucleotide. In one embodiment, provided herein is a method for producing a mature mRNA transcript comprising an iExon, the method comprising contacting a pre-mRNA transcript with a compound described herein (e.g., a compound of Formula (I) or a form thereof), wherein the pre-mRNA transcript comprises two exons and an intron, wherein one exon is upstream of the intron and the other exon is downstream of the intron, wherein the intron comprises in 5′ to 3′ order: a first 5′ splice site, a first branch point, a first 3′ splice site, an endogenous or non-endogenous intronic recognition element for splicing modifier (iREMS), a second branch point, and a second 3′ splice site, wherein the iREMS comprises an RNA sequence GAgurngn (SEQ ID NO: 2), wherein r is adenine or guanine and n is any nucleotide. In another embodiment, provided herein is a method for producing a mature mRNA transcript comprising an iExon, the method comprising contacting a cell or cell lysate containing a pre-mRNA transcript with a compound described herein (e.g., a compound of Formula (I) or a form thereof), wherein the pre-mRNA transcript comprises two exons and an intron, wherein one exon is upstream of the intron and the other exon is downstream of the intron, wherein the intron comprises in 5′ to 3′ order: a first 5′ splice site, a first branch point, a first 3′ splice site, an endogenous or non-endogenous intronic recognition element for splicing modifier (iREMS), a second branch point, and a second 3′ splice site, wherein the iREMS comprises an RNA sequence GAgurngn (SEQ ID NO: 2), wherein r is adenine or guanine and n is any nucleotide. In some embodiments, the pre-mRNA transcript is encoded by a gene disclosed herein (e.g., in a table herein).

[2026] In a particular embodiment, provided herein is a method for producing a mature mRNA transcript comprising an iExon, the method comprising contacting a pre-mRNA transcript with a compound described herein (e.g., a compound of Formula (I) or a form thereof), wherein the pre-mRNA transcript comprises two exons and an intron, wherein one exon is upstream of the intron and the other exon is downstream of the intron, wherein the intron comprises in 5′ to 3′ order: a first 5′ splice site, a first branch point, a first 3′ splice site, an endogenous intronic recognition element for splicing modifier (iREMS), a second branch point, and a second 3′ splice site, wherein the iREMS comprises an RNA sequence GAgurngn (SEQ ID NO: 2), wherein r is adenine or guanine and n is any nucleotide, wherein the pre-mRNA transcript is a pre-mRNA transcript of a gene that is selected from ABCB8, ABCC3, ADAM17, ADCY3, AGPAT4, ANKRA2, ANXA11, APIP, APPL2, ARHGAP1, ARL15, ASAP1, ASPH, ATAD2B, ATXN1, BECN1, BHMT2, BICD1, BTN3A1, C11orf30, C11orf73, C12orf4, C14orf132, C8orf44, C8orf44-SGK3, C8orf88, CASC3, CASP7, CCDC122, CDH13, CECR7, CENPI, CEP112, CEP192, CHEK1, CMAHP, CNRIP1, COPS7B, CPSF4, CRISPLD2, CRYBG3, CSNK1E, CSNK1G1, DCAF17, DCUN1D4, DDX42, DENND1A, DENND5A, DGKA, DHFR, DTAPH3, DNAJC13, DNMBP, DOCK1, DYRK1A, EIF2B3, ENAH, ENOX1, EP300, ERC1, ERLIN2, ERRFI1, EVC, FAF1, FAIM, FAM126A, FAM13A, FAM162A, FAM174A, FBN2, FER, FHOD3, FOCAD, GALC, GCFC2, GGACT, GLCE, GOLGA4, GOLGB1, GPSM2, GULP1, GXYLT1, HDX, HLTF, HMGA2, HNMT, HSD17B12, HSD17B4, HTT, IFT57, IVD, KDM6A, KIAA1524, KIAA1715, LETM2, LOC400927, LRRC42, LUC7L3, LYRM1, MB21D2, MCM10, MED13L, MEDAG, MEMO1, MFN2, MMS19, MRPL45, MRPS28, MTERF3, MYCBP2, MYLK, MYOF, NGF, NREP, NSUN4, NT5C2, OSMR, OXCT1, PAPD4, PCM1, PDE7A, PDS5B, PDXDC1, PIGN, PIK3CD, PIK3R1, PIKFYVE, PITPNB, PLEKHA1, PLSCR1, PMS1, POMT2, PPARG, PPIP5K2, PPP1R26, PRPF31, PRSS23, PSMA4, PXK, RAF1, RAPGEF1, RARS2, RBKS, RERE, RFWD2, RPA1, RPS10, SAMD4A, SARIA, SCO1, SEC24A, SENP6, SERGEF, SGK3, SLC12A2, SLC25A17, SLC44A2, SMYD3, SNAP23, SNHG16, SNX7, SOS2, SPATA5, SPIDR, SPRYD7, SRGAP1, SRRM1, STAT1, STXBP6, SUPT20H, TAF2, TASP1, TBC1D15, TCF12, TCF4, TIAM1, TJP2, TMC3, TMEM214, TNRC6A, TNS3, TOE1, TRAF3, TSPAN2, TTC7B, TYW5, UBAP2L, URGCP, VAV2, WDR27, WDR37, WDR91, WNK1, XRN2, ZCCHC8, ZFP82, ZNF138, ZNF232 or ZNF37BP. In another particular embodiment, provided herein is a method for producing a mature mRNA transcript comprising an iExon, the method comprising contacting a cell or cell lysate containing a pre-mRNA transcript with a compound described herein (e.g., a compound of Formula (I) or a form thereof), wherein the pre-mRNA transcript comprises two exons and an intron, wherein one exon is upstream of the intron and the other exon is downstream of the intron, wherein the intron comprises in 5′ to 3′ order: a first 5′ splice site, a first branch point, a first 3′ splice site, an endogenous intronic recognition element for splicing modifier (iREMS), a second branch point, and a second 3′ splice site, wherein the iREMS comprises an RNA sequence GAgurngn (SEQ ID NO: 2), wherein r is adenine or guanine and n is any nucleotide, wherein the pre-mRNA transcript is a pre-mRNA transcript of a gene that is selected from ABCB8, ABCC3, ADAM17, ADCY3, AGPAT4, ANKRA2, ANXA11, APIP, APPL2, ARHGAP1, ARL15, ASAP1, ASPH, ATAD2B, ATXN1, BECN1, BHMT2, BICD1, BTN3A1, C11orf30, C11orf73, C12orf4, C14orf132, C8orf44, C8orf44-SGK3, C8orf88, CASC3, CASP7, CCDC122, CDH13, CECR7, CENPI, CEP112, CEP192, CHEK1, CMAHP, CNRIP1, COPS7B, CPSF4, CRISPLD2, CRYBG3, CSNK1E, CSNK1G1, DCAF17, DCUN1D4, DDX42, DENND1A, DENND5A, DGKA, DHFR, DIAPH3, DNAJC13, DNMBP, DOCK1, DYRK1A, EIF2B3, ENAH, ENOX1, EP300, ERC1, ERLTN2, ERRFT1, EVC, FAF1, FAIM, FAM126A, FAM13A, FAM162A, FAM174A, FBN2, FER, FHOD3, FOCAD, GALC, GCFC2, GGACT, GLCE, GOLGA4, GOLGB1, GPSM2, GULP1, GXYLT1, HDX, HLTF, HMGA2, HNMT, HSD17B12, HSD17B4, HTT, IFT57, IVD, KDM6A, KIAA1524, KIAA1715, LETM2, LOC400927, LRRC42, LUC7L3, LYRM1, MB21D2, MCM10, MED13L, MEDAG, MEMO1, MFN2, MMS19, MRPL45, MRPS28, MTERF3, MYCBP2, MYLK, MYOF, NGF, NREP, NSUN4, NT5C2, OSMR, OXCT1, PAPD4, PCM1, PDE7A, PDS5B, PDXDC1, PIGN, PIK3CD, PIK3R1, PIKFYVE, PITPNB, PLEKHA1, PLSCR1, PMS1, POMT2, PPARG, PPIP5K2, PPP1R26, PRPF31, PRSS23, PSMA4, PXK, RAF1, RAPGEF1, RARS2, RBKS, RERE, RFWD2, RPA1, RPS10, SAMD4A, SAR1A, SCO1, SEC24A, SENP6, SERGEF, SGK3, SLC12A2, SLC25A17, SLC44A2, SMYD3, SNAP23, SNHG16, SNX7, SOS2, SPATA5, SPIDR, SPRYD7, SRGAP1, SRRM1, STAT1, STXBP6, SUPT20H, TAF2, TASP1, TBC1D15, TCF12, TCF4, TIAM1, TJP2, TMC3, TMEM214, TNRC6A, TNS3, TOE1, TRAF3, TSPAN2, TTC7B, TYW5, UBAP2L, URGCP, VAV2, WDR27, WDR37, WDR91, WNK1, XRN2, ZCCHC8, ZFP82, ZNF138, ZNF232 or ZNF37BP.

[2027] In another aspect, provided herein is a method modulating the amount of a mature mRNA transcript produced by a pre-mRNA transcript, wherein the pre-mRNA transcript comprises two exons and an intron, wherein one exon is upstream of the intron and the other exon is downstream of the intron, wherein the intron comprises a RNA nucleotide sequence comprising in 5′ to 3′ order: an endogenous or non-endogenous intronic recognition element for splicing modifier (iREMS), a first branch point, and a first 3′ splice site, wherein the iREMS comprises an RNA sequence GAgurngn (SEQ ID NO: 2), wherein r is adenine or guanine and n is any nucleotide. In one embodiment, provided herein is a method for modulating the amount of a mature mRNA transcript produced by a pre-mRNA transcript, the method comprising contacting the pre-mRNA transcript with a compound described herein (e.g., a compound of Formula (I) or a form thereof), wherein the pre-mRNA transcript comprises two exons and an intron, wherein one exon is upstream of the intron and the other exon is downstream of the intron, wherein the intron comprises a RNA nucleotide sequence comprising in 5′ to 3′ order: an endogenous or non-endogenous intronic recognition element for splicing modifier (iREMS), a first branch point, and a first 3′ splice site, wherein the iREMS comprises an RNA sequence GAgurngn (SEQ ID NO: 2), wherein r is adenine or guanine and n is any nucleotide. In another embodiment, provided herein is a method for modulating the amount of a mature mRNA transcript produced by a pre-mRNA transcript, the method comprising contacting a cell or cell lysate containing the pre-mRNA transcript with a compound described herein (e.g., a compound of Formula (I) or a form thereof), wherein the pre-mRNA transcript comprises two exons and an intron, wherein one exon is upstream of the intron and the other exon is downstream of the intron, wherein the intron comprises a RNA nucleotide sequence comprising in 5′ to 3′ order: an endogenous or non-endogenous intronic recognition element for splicing modifier (iREMS), a first branch point, and a first 3′ splice site, wherein the iREMS comprises an RNA sequence GAgurngn (SEQ ID NO: 2), wherein r is adenine or guanine and n is any nucleotide. In some embodiments, the intron further comprises a first 5′ splice site, a second branch point, and a second 3′ splice site upstream of the iREMS. In some embodiments, the pre-mRNA transcript is encoded by a gene disclosed herein (e.g., in a table herein).

[2028] In a particular embodiment, provided herein is a method for modulating the amount of a mature mRNA transcript produced by a pre-mRNA transcript, the method comprising contacting the pre-mRNA transcript with a compound described herein (e.g., a compound of Formula (I) or a form thereof), wherein the pre-mRNA transcript comprises two exons and an intron, wherein one exon is upstream of the intron and the other exon is downstream of the intron, wherein the intron comprises a RNA nucleotide sequence comprising in 5′ to 3′ order: an endogenous intronic recognition element for splicing modifier (iREMS), a first branch point, and a first 3′ splice site, wherein the iREMS comprises an RNA sequence GAgurngn (SEQ ID NO: 2), wherein r is adenine or guanine and n is any nucleotide, and wherein the pre-mRNA transcript is a pre-mRNA transcript of a gene that is selected from ABCA10, ABCB8, ABCC3, ACTA2, ADAL, ADAMTS1, ADCY3, ADD1, ADGRG6, ADH6, ADHFE1, AFF3, AGPAT4, AKAP3, ANK1, ANK3, ANKRA2, ANKRD33B, ANKRD36, AP4B1-AS1, APIP, ARHGAP1, ARHGAP12, ARHGEF16, ARID5B, ARL15, ARL9, ARMCX6, ASIC1, ATG5, ATP2A3, ATXN1, B3GALT2, B3GNT6, BCL2L15, BCYRN1, BECN1, BHMT2, BIN3-IT1, BIRC3, BIRC6, BTG2, BTN3A1, C10orf54, C11orf70, C11orf94, C12orf4, C12orf56, C14orf132, C19orf47, C1orf86, C3, C7orf31, C8orf34, C8orf44, C8orf44-SGK3, C8orf88, CA13, CA3, CACNA2D2, CACNB1, CADM1, CAND2, CASP7, CCDC122, CCDC79, CCER2, CCNF, CECR7, CELSR1, CEMIP, CENPI, CEP112, CEP170, CEP192, CFH, CHEK1, CIITA, CLDN23, CLTA, CMAHP, CNGA4, CNRIP1, CNTD1, COL11A1, COL14A1, COL15A1, COL5A1, COL5A3, COL6A6, COL8A1, COLEC12, COMP, CPA4, CPQ, CPSF4, CRISPLD2, CRLF1, CRYBG3, CRYL1, CSNK1E, CSNK1G1, CYB5R2, CYGB, CYP1B1, DAGLB, DCAF17, DCLK1, DCN, DDIT4L, DDX50, DEGS1, DEPTOR, DFNB59, DIRAS3, DLG5, DLGAP4, DNAH8, DNAJC13, DNAJC27, DNMBP, DOCK11, DYNC1I1, DYRK1A, DZIP1L, EFEMP1, EGR3, ELN, ELP4, EMX2OS, ENAH, ENPP1, EP300, ERCC1, ERCC8, ERGIC3, ERLIN2, ERRFI1, ESM1, EVC, EVC2, F2R, FAIM, FAM126A, FAM13A, FAM160A1, FAM162A, FAM174A, FAM20A, FAM46B, FAM65B, FAP, FARP1, FBLN2, FBN2, FBXL6, FCHO1, FGFR2, FGL2, FLT1, FRAS1, FSCN2, GAL3ST4, GALNT15, GATA6, GBGT1, GCNT1, GDF6, GGACT, GLCE, GNAQ, GPR183, GPR50, GPRC5A, GPRC5B, GRTP1, GUCA1B, GULP1, GXYLT1, HAPLN1, HAPLN2, HAS3, HAVCR2, HDAC5, HDX, HECTD2-AS1, HEPH, HEY1, HMGA2, HMGN3-AS1, HNMT, HOOK3, HPS1, HSPA1L, HTATIP2, IFT57, IGDCC4, IGF2R, IGFBP3, IL16, INA, INPP5K, INTU, IQCG, ITGA11, ITGA8, ITGB8, ITIH1, ITPKA, IVD, KAT6B, KCNS1, KCNS2, KDM6A, KDSR, KIAA1456, K1AA1462, K1AA1755, KIT, KLF17, KLRG1, KMT2D, KRT7, KRTAP1-1, KRTAP1-5, L3MBTL2, LAMB2P1, LETM2, LGI2, LGR4, LHX9, LINC00472, LINC00570, LINC00578, LINC00607, LINC00678, LINC00702, LINC00886, LTNC00961, LINC01011, LINC01118, LINC01204, LMOD1, LOC400927, LRBA, LRP4, LRRC32, LRRC39, LRRC42, LSAMP, LUM, LYPD1, LYRM1, MAFB, MAMDC2, MAN2A1, MAN2C1, MAPK13, MASP1, MB, MB21D2, MC4R, MCM10, MED13L, MEGF6, MFN2, MIAT, MIR612, MLLT10, MMP10, MMP24, MN1, MOXD1, MRPL45, MRPL55, MRPS28, MRVI1, MSH4, MTERF3, MXRA5, MYCBP2, NA, NAALADL2, NAE1, NAGS, NDNF, NGF, NGFR, NHLH1, NLN, NOTCH3, NOTUM, NOVA2, NOX4, NRROS, OCLN, OLR1, OSBPL10, OXCT1, OXCT2, PAIP2B, PBLD, PDE1C, PDE5A, PDGFD, PDGFRB, PDS5B, PEAR1, PHACTR3, PIGN, PIK3CD, PIK3R1, PIKFYVE, PIM2, PITPNM3, PLEK2, PLEKHA1, PLEKHA6, PLEKHH2, PLSCR1, PNISR, PODN, POLN, POLR1A, POMT2, PPARG, PPIP5K2, PPM1E, PPP1R26, PPP3CA, PRKCA, PRKG1, PRPF31, PRPH2, PRRG4, PRUNE2, PSMD6-AS2, PTGIS, PTX3, PXK, RAB30, RAB38, RAB44, RAD9B, RAF1, RAPGEF1, RARS, RARS2, RBBP8, RBKS, RDX, RERE, RFX3-AS1, RGCC, ROR1, ROR2, RPA1, RPS10, RPS6KB2, SAMD4A, SCARNA9, SEC24A, SENP6, SERGEF, SGK3, SH3YL1, SHROOM3, SIGLEC10, SKA2, SLC12A2, SLC24A3, SLC35F3, SLC39A10, SLC44A2, SLC46A2, SLC4A11, SLC6A15, SLC7A11, SLC9A3, SLIT3, SMG1P3, SMTN, SNED1, SNX7, SORBS2, SORCS2, SOX7, SPATA18, SPATA5, SPDYA, SPEF2, SPIDR, SPRYD7, SRGAP1, SRRM1, STAC2, STAT4, STK32B, STRN4, STS, STXBP6, SULF1, SVEP1, SYNGR2, SYNPO, SYNPO2, SYNPO2L, TAGLN3, TANGO6, TASP1, TCF12, TCF4, TGFA, TGFB2, TGFB3, TGM2, THBS2, TIAM1, TMC3, TMEM102, TMEM119, TMEM134, TMEM189-UBE2V1, TMEM214, TMEM256-PLSCR3, TMEM50B, TNFAIP8L3, TNFRSF14, TNRC18P1, TNRC6A, TNXB, TP53AIP1, TPRG1, TRIM66, TRPC4, TSHZ2, TSPAN11, TSPAN18, TSPAN7, TSSK3, TTC7B, TUBE1, TXNIP, TYW5, URGCP, USP27X, UVRAG, VAV2, VIM-AS1, VPS41, VSTM2L, VWF, WDR27, WDR91, WISP1, WNK1, WNT10B, YDJC, ZBTB26, ZCCHC5, ZCCHC8, ZFP82, ZMIZ1-AS1, ZNF138, ZNF212, ZNF232, ZNF350, ZNF431, ZNF660, ZNF680, ZNF79, or ZNF837. In a particular embodiment, provided herein is a method for modulating the amount of a mature mRNA transcript produced by a pre-mRNA transcript, the method comprising contacting a cell or cell lysate containing the pre-mRNA transcript with a compound described herein (e.g., a compound of Formula (I) or a form thereof), wherein the pre-mRNA transcript comprises two exons and an intron, wherein one exon is upstream of the intron and the other exon is downstream of the intron, wherein the intron comprises a RNA nucleotide sequence comprising in 5′ to 3′ order: an endogenous intronic recognition element for splicing modifier (iREMS), a first branch point, and a first 3′ splice site, wherein the iREMS comprises an RNA sequence GAgurngn (SEQ ID NO: 2), wherein r is adenine or guanine and n is any nucleotide, and wherein the pre-mRNA transcript is a pre-mRNA transcript of a gene that is selected from ABCA10, ABCB8, ABCC3, ACTA2, ADAL, ADAMTS1, ADCY3, ADD1, ADGRG6, ADH6, ADHFE1, AFF3, AGPAT4, AKAP3, ANK1, ANK3, ANKRA2, ANKRD33B, ANKRD36, AP4B1-AS1, APIP, ARHGAP1, ARHGAP12, ARHGEF16, ARID5B, ARL15, ARL9, ARMCX6, ASIC1, ATG5, ATP2A3, ATXN1, B3GALT2, B3GNT6, BCL2L15, BCYRN1, BECN1, BHMT2, BIN3-IT1, BIRC3, BIRC6, BTG2, BTN3A1, C10orf54, C11orf70, C11orf94, C12orf4, C12orf56, C14orf132, C19orf47, C1orf86, C3, C7orf31, C8orf34, C8orf44, C8orf44-SGK3, C8orf88, CA13, CA3, CACNA2D2, CACNB1, CADM1, CAND2, CASP7, CCDC122, CCDC79, CCER2, CCNF, CECR7, CELSR1, CEMIP, CENPI, CEP112, CEP170, CEP192, CFH, CHEK1, CIITA, CLDN23, CLTA, CMAHP, CNGA4, CNRIP1, CNTD1, COL11A1, COL14A1, COL15A1, COL5A1, COL5A3, COL6A6, COL8A1, COLEC12, COMP, CPA4, CPQ, CPSF4, CRISPLD2, CRLF1, CRYBG3, CRYL1, CSNK1E, CSNK1G1, CYB5R2, CYGB, CYP1B1, DAGLB, DCAF17, DCLK1, DCN, DDIT4L, DDX50, DEGS1, DEPTOR, DFNB59, DIRAS3, DLG5, DLGAP4, DNAH8, DNAJC13, DNAJC27, DNMBP, DOCK11, DYNC1I1, DYRK1A, DZIP1L, EFEMP1, EGR3, ELN, ELP4, EMX2OS, ENAH, ENPP1, EP300, ERCC1, ERCC8, ERGIC3, ERLIN2, ERRFI1, ESM1, EVC, EVC2, F2R, FAIM, FAM126A, FAM13A, FAM160A1, FAM162A, FAM174A, FAM20A, FAM46B, FAM65B, FAP, FARP1, FBLN2, FBN2, FBXL6, FCHO1, FGFR2, FGL2, FLT1, FRAS1, FSCN2, GAL3ST4, GALNT15, GATA6, GBGT1, GCNT1, GDF6, GGACT, GLCE, GNAQ, GPR183, GPR50, GPRC5A, GPRC5B, GRTP1, GUCA1B, GULP1, GXYLT1, HAPLN1, HAPLN2, HAS3, HAVCR2, HDAC5, HDX, HECTD2-AS1, HEPH, HEY1, HMGA2, HMGN3-AS1, HNMT, HOOK3, HPS1, HSPA1L, HTATIP2, IFT57, IGDCC4, IGF2R, IGFBP3, IL16, INA, INPP5K, INTU, IQCG, ITGA11, ITGA8, ITGB8, ITIH1, ITPKA, IVD, KAT6B, KCNS1, KCNS2, KDM6A, KDSR, KIAA1456, KIAA1462, KIAA1755, KIT, KLF17, KLRG1, KMT2D, KRT7, KRTAP1-1, KRTAP1-5, L3MBTL2, LAMB2P1, LETM2, LGI2, LGR4, LHX9, LINC00472, LINC00570, LINC00578, LINC00607, LINC00678, LINC00702, LINC00886, LINC00961, LINC01011, LINC01118, LINC01204, LMOD1, LOC400927, LRBA, LRP4, LRRC32, LRRC39, LRRC42, LSAMP, LUM, LYPD1, LYRM1, MAFB, MAMDC2, MAN2A1, MAN2C1, MAPK13, MASP1, MB, MB21D2, MC4R, MCM10, MED13L, MEGF6, MFN2, MIAT, MIR612, MLLT10, MMP10, MMP24, MN1, MOXD1, MRPL45, MRPL55, MRPS28, MRVI1, MSH4, MTERF3, MXRA5, MYCBP2, NA, NAALADL2, NAE1, NAGS, NDNF, NGF, NGFR, NHLH1, NLN, NOTCH3, NOTUM, NOVA2, NOX4, NRROS, OCLN, OLR1, OSBPL10, OXCT1, OXCT2, PAIP2B, PBLD, PDE1C, PDE5A, PDGFD, PDGFRB, PDS5B, PEAR1, PHACTR3, PIGN, PIK3CD, PIK3R1, PIKFYVE, PIM2, PITPNM3, PLEK2, PLEKHA1, PLEKHA6, PLEKHH2, PLSCR1, PNISR, PODN, POLN, POLR1A, POMT2, PPARG, PPIP5K2, PPM1E, PPP1R26, PPP3CA, PRKCA, PRKG1, PRPF31, PRPH2, PRRG4, PRUNE2, PSMD6-AS2, PTGIS, PTX3, PXK, RAB30, RAB38, RAB44, RAD9B, RAF1, RAPGEF1, RARS, RARS2, RBBP8, RBKS, RDX, RERE, RFX3-AS1, RGCC, ROR1, ROR2, RPA1, RPS10, RPS6KB2, SAMD4A, SCARNA9, SEC24A, SENP6, SERGEF, SGK3, SH3YL1, SHROOM3, SIGLEC10, SKA2, SLC12A2, SLC24A3, SLC35F3, SLC39A10, SLC44A2, SLC46A2, SLC4A11, SLC6A15, SLC7A11, SLC9A3, SLIT3, SMG1P3, SMTN, SNED1, SNX7, SORBS2, SORCS2, SOX7, SPATA18, SPATA5, SPDYA, SPEF2, SPIDR, SPRYD7, SRGAP1, SRRM1, STAC2, STAT4, STK32B, STRN4, STS, STXBP6, SULF1, SVEP1, SYNGR2, SYNPO, SYNPO2, SYNPO2L, TAGLN3, TANGO6, TASP1, TCF12, TCF4, TGFA, TGFB2, TGFB3, TGM2, THBS2, TIAM1, TMC3, TMEM102, TMEM119, TMEM134, TMEM189-UBE2V1, TMEM214, TMEM256-PLSCR3, TMEM50B, TNFAIP8L3, TNFRSF14, TNRC18P1, TNRC6A, TNXB, TP53AIP1, TPRG1, TRIM66, TRPC4, TSHZ2, TSPAN11, TSPAN18, TSPAN7, TSSK3, TTC7B, TUBE1, TXNIP, TYW5, URGCP, USP27X, UVRAG, VAV2, VIM-AS1, VPS41, VSTM2L, VWF, WDR27, WDR91, WISP1, WNK1, WNT10B, YDJC, ZBTB26, ZCCHC5, ZCCHC8, ZFP82, ZMIZ1-AS1, ZNF138, ZNF212, ZNF232, ZNF350, ZNF431, ZNF660, ZNF680, ZNF79, or ZNF837. In some embodiments, the intron further comprises a first 5′ splice site, a second branch point, and a second 3′ splice site upstream of the iREMS.

[2029] In certain embodiments, the cell(s) contacted or cultured with a compound of Formula (I) or a form thereof is primary cell(s) or cell(s) from a cell line. In some embodiments, the cell(s) contacted or cultured with a compound of Formula (I) or a form thereof is a fibroblast(s), an immune cell(s), or a muscle cell(s). In some embodiments, the cell(s) contacted or cultured with a compound of Formula (I) or a form thereof is a cancer cell. Non-limiting examples of cell lines include 3T3, 4T1, 721, 9L, A2780, A172, A20, A253, A431, A-549, ALC, B16, B35, BCP-1, BEAS-2B, bEnd.3, BHK, BR 293, BT20, BT483, BxPC3, C2C12, C3H-10T1/2, C6/36, C6, Cal-27, CHO, COR-L23, COS, COV-434, CML T1, CMT, CRL7030, CT26, D17, DH82, DU145, DuCaP, EL4, EM2, EM3, EMT6, FM3, H1299, H69, HB54, HB55, HCA2, HDF, HEK-293, HeLa, Hepa1c1c7, HL-60, HMEC, Hs578T, HsS78Bst, HT-29, HTB2, HUVEC, Jurkat, J558L, JY, K562, Ku812, KCL22, KG1, KYO1, LNCap, Ma-Mel, MC-38, MCF-7, MCF-1OA, MDA-MB-231, MDA-MB-468, MDA-MB-435, MDCK, MG63, MOR/0.2R, MONO-MAC 6, MRC5, MTD-1A, NCI-H69, NIH-3T3, NALM-1, NS0, NW-145, OPCN, OPCT, PNT-1A, PNT-2, Raji, RBL, RenCa, RIN-5F, RMA, Saos-2, Sf21, Sf9, SH-SY5Y, SiHa, SKBR3, SKOV-3, T2, T-47D, T84, THP1, U373, U87, U937, VCaP, Vero, VERY, W138, WM39, WT-49, X63, YAC-1, and YAR cells. In one embodiment, the cells are from a patient. In another embodiment, the patient cells are GM03813 cells.

[2030] In certain embodiments described herein, the cell(s) is contacted or cultured with a compound of Formula (I) or a form thereof with a compound of Formula (I) or a form thereof for a period of 15 minutes, 30 minutes, 45 minutes, 1 hour, 2 hours, 3 hours, 4 hours, 5 hours, 6 hours, 8 hours, 12 hours, 18 hours, 24 hours, 48 hours, 72 hours or more. In other embodiments described herein, the cell(s) is contacted or cultured with a compound of Formula (I) or a form thereof with a compound of Formula (I) or a form thereof for a period of 15 minutes to 1 hour, 1 to 2 hours, 2 to 4 hours, 6 to 12 hours, 12 to 18 hours, 12 to 24 hours, 28 to 24 hours, 24 to 48 hours, 48 to 72 hours.

[2031] In certain embodiments described herein, the cell(s) is contacted or cultured with a certain concentration of a compound of Formula (I) or a form thereof, wherein the certain concentration is 0.01 μM, 0.05 μM, 1 μM, 2 μM, 5 μM, 10 μM, 15 μM, 20 μM, 25 μM, 50 μM, 75 μM, 100 μM, or 150 μM. In other embodiments described herein, the cell(s) is contacted or cultured with a certain concentration of a compound of Formula (I) or a form thereof, wherein the certain concentration is 175 μM, 200 μM, 250 μM, 275 μM, 300 μM, 350 μM, 400 μM, 450 μM, 500 μM, 550 μM 600 μM, 650 μM, 700 μM, 750 μM, 800 μM, 850 μM, 900 μM, 950 μM or 1 mM. In some embodiments described herein, the cell(s) is contacted or cultured with a certain concentration of a compound of Formula (I) or a form thereof, wherein the certain concentration is 5 nM, 10 nM, 20 nM, 30 nM, 40 nM, 50 nM, 60 nM, 70 nM, 80 nM, 90 nM, 100 nM, 150 nM, 200 nM, 250 nM, 300 nM, 350 nM, 400 nM, 450 nM, 500 nM, 550 nM, 600 nM, 650 nM, 700 nM, 750 nM, 800 nM, 850 nM, 900 nM, or 950 nM. In certain embodiments described herein, the cell(s) is contacted or cultured with a certain concentration of a compound of Formula (I) or a form thereof, wherein the certain concentration is between 0.01 μM to 0.1 μM, 0.1 μM to 1 μM, 1 μM to 50 μM, 50 μM to 100 μM, 100 μM to 500 μM, 500 μM to 1 nM, 1 nM to 10 nM, 10 nM to 50 nM, 50 nM to 100 nM, 100 nM to 500 nM, 500 nM to 1000 nM. In certain embodiments described herein, the cell(s) is contacted or cultured with a certain concentration of a compound of Formula (I) or a form thereof that results in a substantial change in the amount of an RNA transcript (e.g., an mRNA transcript), an alternatively spliced variant, or an isoform of a gene (e.g., a gene in Table 1, infra).

[2032] In another aspect, provided herein are methods for modulating the amount of one, two, three or more RNA transcripts of a gene, wherein the precursor RNA transcript transcribed from the gene comprises an intronic REMS, the methods comprising administering to a human or non-human subject a compound of Formula (I) or a form thereof, or a pharmaceutical composition comprising a compound of Formula (I) or a form thereof and a pharmaceutically acceptable carrier, excipient or diluent. In a specific embodiment, the precursor RNA transcript further contains a branch point and a 3′ splice site upstream from the intronic REMS.

[2033] In one embodiment, provided herein are methods for modulating the amount of one, two, three or more RNA transcripts of a gene, by way of nonlimiting example, disclosed in Table 1, infra, the methods comprising administering to a human or non-human subject a compound of Formula (I) or a form thereof, or a pharmaceutical composition comprising a compound of Formula (I) or a form thereof and a pharmaceutically acceptable carrier, excipient or diluent. In a specific embodiment, the RNA transcript contains in 5′ to 3′ order: a branch point, a 3′ splice site and an intronic REMS.

[2034] In another embodiment, provided herein are methods for modulating the amount of one, two, three or more RNA transcripts of a gene, disclosed in Tables 2-7, infra, wherein the precursor RNA transcript transcribed from the gene comprises an intronic REMS, the methods comprising administering to a human or non-human subject a compound of Formula (I) or a form thereof, or a pharmaceutical composition comprising a compound of Formula (I) or a form thereof and a pharmaceutically acceptable carrier, excipient or diluent. In another embodiment, provided herein are methods for modulating the amount of one, two, three or more RNA transcripts of a gene in a subject, disclosed in International Patent Application No. PCT/US2014/071252 (International Publication No. WO 2015/105657), wherein the precursor RNA transcript transcribed from the gene comprises an intronic REMS, the methods comprising administering to the subject a compound of Formula (I) or a form thereof, or a pharmaceutical composition comprising a compound of Formula (I) or a form thereof and a pharmaceutically acceptable carrier, excipient or diluent. In another embodiment, provided herein are methods for modulating the amount of one, two, three or more RNA transcripts of a gene in a subject, disclosed in International Patent Application No. PCT/US2016/034864 (International Publication No. WO 2016/196386), wherein the precursor RNA transcript transcribed from the gene comprises an intronic REMS, the methods comprising administering to the subject a compound of Formula (I) or a form thereof, or a pharmaceutical composition comprising a compound of Formula (I) or a form thereof and a pharmaceutically acceptable carrier, excipient or diluent. In a specific embodiment, the precursor RNA transcript contains in 5′ to 3′ order: a branch point, a 3′ splice site and an intronic REMS.

[2035] In another embodiment, provided herein are methods for modulating the amount of one, two, three or more RNA transcripts of a gene, disclosed in International Patent Application No. PCT/US2014/071252 (International Publication No. WO 2015/105657), wherein the precursor RNA transcript transcribed from the gene comprises an intronic REMS, the methods comprising administering a human or non-human subject a compound of Formula (I) or a form thereof, or a pharmaceutical composition comprising a compound of Formula (I) or a form thereof and a pharmaceutically acceptable carrier, excipient or diluent. In another embodiment, provided herein are methods for modulating the amount of one, two, three or more RNA transcripts of a gene, disclosed in International Patent Application No. PCT/US2016/034864 (International Publication No. WO 2016/196386), wherein the precursor RNA transcript transcribed from the gene comprises an intronic REMS, the methods comprising administering a human or non-human subject a compound of Formula (I) or a form thereof, or a pharmaceutical composition comprising a compound of Formula (I) or a form thereof and a pharmaceutically acceptable carrier, excipient or diluent. In a specific embodiment, the precursor RNA transcript contains in 5′ to 3′ order: a branch point, a 3′ splice site and an intronic REMS.

[2036] In a particular aspect, provided herein are methods for modulating the amount of one, two, three or more RNA transcripts of a gene in a subject, wherein the precursor RNA transcript transcribed from the gene comprises an intronic REMS (for example, an endogenous intronic REMS or a non-endogenous intronic REMS), the methods comprising administering to the subject a compound of Formula (I) or a form thereof, or a pharmaceutical composition comprising a compound of Formula (I) or a form thereof and a pharmaceutically acceptable carrier, excipient or diluent. In a specific embodiment, the precursor RNA transcript contains in 5′ to 3′ order a branch point, a 3′ splice site and an intronic REMS. In specific embodiments of the foregoing aspects, as listed in Table 1, the gene is ABCA1, ABCA10, ABCB7, ABCB8, ABCC1, ABCC3, ABHD10, ABL2, ABLIM3, ACACA, ACADVL, ACAT2, ACTA2, ADAL, ADAM12, ADAM15, ADAM17, ADAM33, ADAMTS1, ADCY3, ADD1, ADGRG6, ADH6, ADHFE1, AFF2, AFF3, AGK, AGPAT3, AGPAT4, AGPS, AHCYL2, AHDC1, AHRR, AJUBA, AK021888, AK310472, AKAP1, AKAP3, AKAP9, AKNA, ALCAM, ALDH4A1, AMPD2, ANK1, ANK2, ANK3, ANKFY1, ANKHD1-EIF4EBP3, ANKRA2, ANKRD17, ANKRD33B, ANKRD36, ANKS6, ANP32A, ANXA11, ANXA6, AP2B1, AP4B1-AS1, APAF1, APIP, APLP2, APP, APPL2, APTX, ARHGAP1, ARHGAP12, ARHGAP22, ARHGEF16, ARID1A, ARID2, ARID5B, ARL9, ARL15, ARMCX3, ARMCX6, ASAP1, ASIC1, ASL, ASNS, ASPH, ATAD2B, ATF71P, ATG5, ATG9A, ATMIN, ATP2A3, ATP2C1, ATXN1, ATXN3, AURKA, AXIN1, B3GALT2, B3GNT6, B4GALT2, BACE1, BAG2, BASP1, BC033281, BCAR3, BCL2L15, BCYRN1, BECN1, BEND6, BHMT2, BICD1, BIN1, BIN3-IT1, BIRC3, BIRC6, BNC1, BRD2, BRPF1, BSCL2, BTBD10, BTG2, BTN3A1, BZW1, C1orf86, C10orf54, C11orf30, C11orf70, C11orf73, C11orf94, C12orf4, C12orf56, C14orf132, C17orf76-AS1, C19orf47, C3, C4orf27, C5orf24, C6orf48, C7orf31, C8orf34, C8orf44, C8orf44-SGK3, C8orf88, C9orf69, CA13, CA3, CAB39, CACNA2D2, CACNB1, CADM1, CALU, CAMKK1, CAND2, CAPNS1, CASC3, CASP7, CASP8AP2, CAV1, CCAR1, CCDC77, CCDC79, CCDC88A, CCDC92, CCDC122, CCER2, CCNF, CCT6A, CD276, CD46, CDC25B, CDC40, CDC42BPA, CDCA7, CDH11, CDH13, CDK11B, CDK16, CDKAL1, CECR7, CELSR1, CEMIP, CENPI, CEP112, CEP170, CEP192, CEP68, CFH, CFLAR, CHD8, CHEK1, CIITA, CIZ1, CLDN23, CLIC1, CLK4, CLTA, CMAHP, CNGA4, CNOT1, CNRIP1, CNTD1, COG1, COL1A1, COL11A1, COL12A1, COL14A1, COL15A1, COL5A1, COL5A3, COL6A1, COL6A6, COL8A1, COLEC12, COMP, COPS7B, CPA4, CPEB2, CPQ, CPSF4, CREB5, CRISPLD2, CRLF1, CRLS1, CRTAP, CRYBG3, CRYL1, CSDE1, CSNK1A1, CSNK1E, CSNK1G1, CTDSP2, CTNND1, CUL2, CUL4A, CUX1, CYB5B, CYB5R2, CYBRD1, CYGB, CYP1B1, CYP51A1, DAB2, DACT1, DAGLB, DARS, DAXX, DCAF10, DCAF11, DCAF17, DCBLD2, DCLK1, DCN, DCUN1D4, DDAH1, DDAH2, DDHD2, DDIT4L, DDR1, DDX39B, DDX42, DDX50, DEGS1, DENND1A, DENND1B, DENND5A, DEPTOR, DFNB59, DGCR2, DGKA, DHCR24, DHCR7, DHFR, DHX9, DIAPH1, DIAPH3, DIRAS3, DIS3L, DKFZp434M1735, DKK3, DLC1, DLG5, DLGAP4, DNAH8, DNAJC13, DNAJC27, DNM2, DNMBP, DOCK1, DOCK11, DPP8, DSEL, DST, DSTN, DYNC1I1, DYRK1A, DZIP1L, EBF1, EEA1, EEF1A1, EFCAB14, EFEMP1, EGR1, EGR3, EHMT2, EIF2B3, EIF4G1, EIF4G2, EIF4G3, ELF2, ELN, ELP4, EMX2OS, ENAH, ENG, ENPP1, ENPP2, ENSA, EP300, EPN1, EPT1, ERC1, ERCC1, ERCC8, ERGIC3, ERLIN2, ERRFI1, ESM1, ETV5, EVC, EVC2, EXO1, EXTL2, EYA3, F2R, FADS1, FADS2, FAF1, FAIM, FAM111A, FAM126A, FAM13A, FAM160A1, FAM162A, FAM174A, FAM198B, FAM20A, FAM219A, FAM219B, FAM3C, FAM46B, FAM65A, FAM65B, FAP, FARP1, FBLN2, FBN2, FBXO9, FBXL6, FBXO10, FBXO18, FBXO31, FBXO34, FBXO9, FCHO1, FDFT1, FDPS, FER, FEZ1, FGD5-AS1, FGFR2, FGFRL1, FGL2, FHOD3, FLII, FLNB, FLT1, FN1, FNBP1, FOCAD, FOS, FOSB, FOSL1, FOXK1, FOXM1, FRAS1, FSCN2, FUS, FYN, GABPB1, GAL3ST4, GALC, GALNT1, GALNT15, GAS7, GATA6, GBA2, GBGT1, GCFC2, GCNT1, GDF6, GGACT, GGCT, GHDC, GIGYF2, GJC1, GLCE, GMIP, GNA13, GNAQ, GNAS, GNL3L, GOLGA2, GOLGA4, GOLGB1, GORASP1, GPR1, GPR183, GPR50, GPR89A, GPRC5A, GPRC5B, GPSM2, GREM1, GRK6, GRTP1, GSE1, GTF2H2B, GUCA1B, GULP1, GXYLT1, HAPLN1, HAPLN2, HAS2, HAS3, HAT1, HAUS3, HAUS6, HAVCR2, HDAC5, HDAC7, HDX, HECTD2-AS1, HEG1, HEPH, HEY1, HLA-A, HLA-E, HLTF, HMGA1, HMGA2, HMGB1, HMGCR, HMGN3-AS1, HMGCS1, HOOK3, HMOX1, HNMT, HNRNPR, HNRNPUL1, HP1BP3, HPS1, HRH1, HSD17B12, HSD17B4, HSPA1L, HTATIP2, HTT, IARS, IDH1, IDI1, IFT57, IGDCC4, IGF2BP2, IGF2R, IGFBP3, IL16, IL6ST, INA, INHBA, INPP5K, INSIG1, INTU, IQCE, IQCG, ITGA11, ITGA8, ITGAV, ITGB5, ITGB8, ITIH1, ITM2C, ITPKA, ITSN1, IVD, KANSL3, KAT6B, KCNK2, KCNS1, KCNS2, KDM6A, KDSR, KIAA1033, KIAA1143, KIAA1199, KIAA1456, KIAA1462, KIAA1522, KIAA1524, KIAA1549, KIAA1715, KIAA1755, KIF14, KIF2A, KIF3A, KIT, KLC1, KLC2, KLF17, KLF6, KLHL7, KLRG1, KMT2D, KRT7, KRT18, KRT19, KRT34, KRTAP1-1, KRTAP1-5, KRTAP2-3, L3MBTL2, LAMA2, LAMB1, LAMB2P1, LARP4, LARP7, LATS2, LDLR, LEMD3, LETM2, LGALS8, LGI2, LGR4, LHX9, LIMS1, LINC00341, LINC00472, LINC00570, L1NC00578, LINC00607, L1NC00657, L1NC00678, LINC00702, L1NC00886, LINC00961, LINC01011, LINC01118, LINC01204, LMAN2L, LMO7, LMOD1, LOC400927, LONP1, LOX, LRBA, LRCH4, LRIG1, LRP4, LRP8, LRRC32, LRRC39, LRRC42, LRRC8A, LSAMP, LSS, LTBR, LUC7L2, LUM, LYPD1, LYRM1, LZTS2, MADD, MAFB, MAGED4, MAGED4B, MAMDC2, MAN1A2, MAN2A1, MAN2C1, MAP4K4, MAPK13, MASP1, MB, MB21D2, MBD1, MBOAT7, MC4R, MCM10, MDM2, MED1, MED13L, MEDAG, MEF2D, MEGF6, MEIS2, MEMO1, MEPCE, MFGE8, MFN2, MIAT, MICAL2, MINPP1, MIR612, MKL1, MKLN1, MKNK2, MLLT4, MLLT10, MLST8, MMAB, MMP10, MMP24, MMS19, MMS22L, MN1, MOXD1, MPPE1, MPZL1, MRPL3, MRPL45, MRPL55, MRPS28, MRVI1, MSANTD3, MSC, MSH2, MSH4, MSH6, MSL3, MSMO1, MSRB3, MTAP, MTERF3, MTERFD1, MTHFD1L, MTMR9, MTRR, MUM1, MVD, MVK, MXRA5, MYADM, MYCBP2, MYLK, MYO1D, MYO9B, MYOF, NA, NAA35, NAALADL2, NADK, NAE1, NAGS, NASP, NAV1, NAV2, NCOA1, NCOA3, NCOA4, NCSTN, NDNF, NELFA, NEO1, NEURLIB, NF2, NFE2L1, NFX1, NGF, NGFR, NHLH1, NID1, NID2, NIPA1, NKX3-1, NLN, NOL10, NOMO3, NOTCH3, NOTUM, NOVA2, NOX4, NPEPPS, NRD1, NREP, NRG1, NRROS, NSUN4, NT5C2, NT5E, NTNG1, NUDT4, NUP153, NUP35, NUP50, NUPL1, NUSAP1, OCLN, ODF2, OLR1, OS9, OSBPL6, OSBPL10, OSMR, OXCT1, OXCT2, P4HA1, P4HB, PABPC1, PAIP2B, PAK4, PAPD4, PARD3, PARN, PARP14, PARP4, PARVB, PBLD, PCBP2, PCBP4, PCDHGB3, PCGF3, PCM1, PCMTD2, PCNXL2, PCSK9, PDE1C, PDE4A, PDE5A, PDE7A, PDGFD, PDGFRB, PDLIM7, PDS5B, PDXDC1, PEAR1, PEPD, PEX5, PFKP, PHACTR3, PHF19, PHF8, PHRF1, PHTF2, PI4K2A, PIEZO1, PIGN, PIGU, PIK3C2B, PIK3CD, PIK3R1, PIKFYVE, PIM2, PITPNA, PITPNB, PITPNM1, PITPNM3, PLAU, PLEC, PLEK2, PLEKHA1, PLEKHA6, PLEKHB2, PLEKHH2, PLSCR1, PLSCR3, PLXNB2, PLXNC1, PMS1, PNISR, PODN, POLE3, POLN, POLR1A, POLR3D, POMT2, POSTN, POU2F1, PPAPDC1A, PPARA, PPARG, PPHLN1, PPIP5K1, PPIP5K2, PPM1E, PPP1R12A, PPP1R26, PPP3CA, PPP6R1, PPP6R2, PRKACB, PRKCA, PRKDC, PRKG1, PRMT1, PRNP, PRPF31, PRPH2, PRRG4, PRSS23, PRUNE2, PSMA4, PSMC1, PSMD6, PSMD6-AS2, PTGIS, PTK2B, PTPN14, PTX3, PUF60, PUS7, PVR, PXK, PXN, QKI, RAB23, RAB2B, RAB30, RAB34, RAB38, RAB44, RAD1, RAD9B, RAD23B, RAF1, RALB, RAPlA, RAP1GDS1, RAPGEF1, RARG, RARS, RARS2, RASSF8, RBBP8, RBCK1, RBFOX2, RBKS, RBM10, RCC1, RDX, RERE, RFTN1, RFWD2, RFX3-AS1, RGCC, RGS10, RGS3, RIF1, RNF14, RNF19A, RNF38, RNFT1, ROR1, ROR2, RPA1, RPL10, RPS10, RPS6KB2, RPS6KC1, RRBP1, RWDD4, SAMD4A, SAMD9, SAMD9L, SAR1A, SART3, SCAF4, SCAF8, SCARNA9, SCD, SCLT1, SCO1, SDCBP, SEC14L1, SEC22A, SEC24A, SEC24B, SEC61A1, SENP6, SEPT9, SERGEF, SERPINE2, SF1, SGK3, SGOL2, SH3RF1, SH3YL1, SHROOM3, SIGLEC10, SKA2, SKIL, SLC12A2, SLC24A3, SLC25A17, SLC35F3, SLC39A3, SLC39A10, SLC4A4, SLC4A11, SLC41A1, SLC44A2, SLC46A2, SLC6A15, SLC7A6, SLC7A8, SLC7A11, SLC9A3, SLIT3, SMARCA4, SMARCC2, SMC4, SMC6, SMCHD1, SMG1, SMG1P3, SMN2, SMPD4, SMTN, SMYD3, SMYD5, SNAP23, SNED1, SNHG16, SNX7, SNX14, SOCS2, SON, SORBS2, SORCS2, SOS2, SOX7, SPATA18, SPATA20, SPATA5, SPATS2, SPDYA, SPEF2, SPG20, SPIDR, SPRED2, SPRYD7, SQLE, SQRDL, SQSTM1, SRCAP, SREBF1, SREK1, SRGAP1, SRRM1, SRSF3, STAC2, STARD4, STAT1, STAT3, STAT4, STAU1, STC2, STEAP2, STK32B, STRIP1, STRN3, STRN4, STS, STX16, STXBP6, SULF1, SUPT20H, SVEP1, SYNE1, SYNE2, SYNGR2, SYNPO, SYNPO2, SYNPO2L, SYT15, SYTL2, TACC1, TAF2, TAGLN3, TANC2, TANGO6, TARBP1, TARS, TASP1, TBC1D15, TBL2, TCF12, TCF4, TCF7L2, TENC1, TENM2, TEP1, TET3, TEX21P, TFCP2, TGFA, TGFB2, TGFB3, TGFB1, TGFBR1, TGFBRAP1, TGM2, THADA, THAP4, THBS2, THRB, TIAM1, TIMP2, TJP2, TLE3, TLK1, TMC3, TMEM102, TMEM119, TMEM134, TMEM154, TMEM189-UBE2V1, TMEM214, TMEM256-PLSCR3, TMEM47, TMEM50B, TMEM63A, TNC, TNFAIP3, TNFAIP8L3, TNFRSF12A, TNFRSF14, TNIP1, TNKS1BP1, TNPO3, TNRC18P1, TNRC6A, TNS1, TNS3, TNXB, TOE1, TOMM40, TOMM5, TOPORS, TP53AIP1, TP53INP1, TPRG1, TRAF3, TRAK1, TRAPPC12, TRIB1, TRIM2, TRIM23, TRIM26, TRIM28, TRIM65, TRIM66, TRMT1L, TRPC4, TRPS1, TSC2, TSHZ1, TSHZ2, TSPAN11, TSPAN18, TSPAN2, TSPAN7, TSSK3, TTC7A, TTC7B, TUBB2C, TUBB3, TUBE1, TXNIP, TXNL1, TXNRD1, TYW5, U2SURP, UBAP2L, UBE2G2, UBE2V1, UBQLN4, UCHL5, UHMK1, UHRF1BP1L, UNC5B, URGCP, USP19, USP7, USP27X, UVRAG, VANGL1, VARS2, VAV2, VCL, VIM-AS1, VIPAS39, VPS13A, VPS29, VPS41, VPS51, VSTM2L, VWA8, VWF, WDR19, WDR27, WDR37, WDR48, WDR91, WIPF1, WISP1, WNK1, WNT5B, WNT10B, WSB1, WWTR1, XIAP, XRN2, YAP1, YDJC, YES1, YPEL5, YTHDF3, Z24749, ZAK, ZBTB10, ZBTB24, ZBTB26, ZBTB7A, ZC3H12C, ZC3H14, ZC3H18, ZCCHC5, ZCCHC8, ZCCHC11, ZEB1, ZEB2, ZFAND1, ZFAND5, ZFP82, ZHX3, ZMIZ1, ZMIZ1-AS1, ZMYM2, ZNF12, ZNF138, ZNF148, ZNF212, ZNF219, ZNF227, ZNF232, ZNF24, ZNF268, ZNF28, ZNF281, ZNF335, ZNF350, ZNF37A, ZNF37BP, ZNF395, ZNF431, ZNF583, ZNF621, ZNF652, ZNF655, ZNF660, ZNF674, ZNF680, ZNF74, ZNF764, ZNF778, ZNF780A, ZNF79, ZNF827, ZNF837, ZNF839 or ZNF91.

[2037] In a specific embodiment of the foregoing aspect, as listed in Table 2, the gene is: ABCA1, ABCB7, ABCC1, ABHD10, ABL2, ABLIM3, ACACA, ACADVL, ACAT2, ADAM12, ADAM15, ADAM17, ADAM33, AFF2, AGK, AGPAT3, AGPS, AHCYL2, AHDC1, AHRR, AJUBA, AK021888, AK310472, AKAP1, AKAP9, AKNA, ALCAM, ALDH4A1, AMPD2, ANK2, ANKFY1, ANKHD1-EIF4EBP3, ANKRD17, ANKS6, ANP32A, ANXA11, ANXA6, AP2B1, APAF1, APLP2, APP, APPL2, APTX, ARHGAP22, ARID1A, ARID2, ARMCX3, ASAP1, ASL, ASNS, ASPH, ATAD2B, ATF7IP, ATG9A, ATMIN, ATP2C1, ATXN3, AURKA, AXIN1, B4GALT2, BACE1, BAG2, BASP1, BC033281, BCAR3, BEND6, BICD1, BIN1, BNC1, BRD2, BRPF1, BSCL2, BTBD10, BZW1, C11orf30, C11orf73, C17orf76-AS1, C4orf27, C5orf24, C6orf48, C9orf69, CAB39, CALU, CAMKK1, CAPNS1, CASC3, CASP8AP2, CAV1, CCAR1, CCDC77, CCDC88A, CCDC92, CCT6A, CD276, CD46, CDC25B, CDC40, CDC42BPA, CDCA7, CDH11, CDH13, CDK11B, CDK16, CDKAL1, CEP68, CFLAR, CHD8, CIZ1, CLIC1, CLK4, CNOT1, COG1, COL12A1, COL1A1, COL6A1, COPS7B, CPEB2, CREB5, CRLS1, CRTAP, CSDE1, CSNK1A1, CTDSP2, CTNND1, CUL2, CUL4A, CUX1, CYB5B, CYBRD1, CYP51A1, DAB2, DACT1, DARS, DAXX, DCAF10, DCAF11, DCBLD2, DCUN1D4, DDAH1, DDAH2, DDHD2, DDR1, DDX39B, DDX42, DENND1A, DENND1B, DENND5A, DGCR2, DGKA, DHCR24, DHCR7, DHFR, DHX9, DIAPH1, DIAPH3, DIS3L, DKFZp434M1735, DKK3, DLC1, DNM2, DOCK1, DPP8, DSEL, DST, DSTN, EBF1, EEA1, EEF1A1, EFCAB14, EGR1, EHMT2, EIF2B3, EIF4G1, EIF4G2, EIF4G3, ELF2, ENG, ENPP2, ENSA, EPN1, EPT1, ERC1, ERGIC3, ETV5, EXO1, EXTL2, EYA3, FADS1, FADS2, FAF1, FAM111A, FAM198B, FAM219A, FAM219B, FAM3C, FAM65A, FBXO10, FBXO18, FBXO31, FBXO34, FBXO9, FDFT1, FDPS, FER, FEZ1, FGD5-AS1, FGFRL1, FHOD3, FLII, FLNB, FN1, FNBP1, FOCAD, FOS, FOSB, FOSL1, FOXK1, FOXM1, FUS, FYN, GABPB1, GALC, GALNT1, GAS7, GBA2, GCFC2, GGCT, GHDC, GIGYF2, GJC1, GMIP, GNA13, GNAS, GNL3L, GOLGA2, GOLGA4, GOLGB1, GORASP1, GPR1, GPR89A, GPSM2, GREM1, GRK6, GSE1, GTF2H2B, HAS2, HAT1, HAUS3, HAUS6, HDAC7, HEG1, HLA-A, HLA-E, HLTF, HMGA1, HMGB1, HMGCR, HMGCS1, HMOX1, HNRNPR, HNRNPUL1, HP1BP3, HRH1, HSD17B12, HSD17B4, HTT, IARS, IDH1, 1DI1, IGF2BP2, IL6ST, INHBA, INSIG1, IQCE, ITGAV, ITGB5, ITM2C, ITSN1, KANSL3, KCNK2, KIAA1033, KIAA1143, KIAA1199, KIAA1522, KIAA1524, KIAA1549, KTAA1715, KIF14, KIF2A, KIF3A, KLC1, KLC2, KLF6, KLHL7, KRT18, KRT19, KRT34, KRTAP2-3, LAMA2, LAMB1, LARP4, LARP7, LATS2, LDLR, LEMD3, LGALS8, LIMS1, LINC00341, LINC00657, LMAN2L, LMO7, LONP1, LOX, LRCH4, LRIG1, LRP8, LRRC8A, LSS, LTBR, LUC7L2, LZTS2, MADD, MAGED4, MAGED4B, MAN1A2, MAP4K4, MBD1, MBOAT7, MDM2, MED1, MEDAG, MEF2D, MEIS2, MEMO1, MEPCE, MFGE8, MICAL2, MINPP1, MKL1, MKLN1, MKNK2, MLLT4, MLST8, MMAB, MMS19, MMS22L, MPPE1, MPZL1, MRPL3, MSANTD3, MSC, MSH2, MSH6, MSL3, MSMO1, MSRB3, MTAP, MTERFD1, MTHFD1L, MTMR9, MTRR, MUM1, MVD, MVK, MYADM, MYLK, MYO1D, MYO9B, MYOF, NAA35, NADK, NASP, NAV1, NAV2, NCOA1, NCOA3, NCOA4, NCSTN, NELFA, NEO1, NEURLIB, NF2, NFE2L1, NFX1, NID1, NID2, NIPA1, NKX3-1, NOL10, NOMO3, NPEPPS, NRD1, NREP, NRG1, NSUN4, NT5C2, NT5E, NTNG1, NUDT4, NUP153, NUP35, NUP50, NUPL1, NUSAP1, ODF2, OS9, OSBPL6, OSMR, P4HA1, P4HB, PABPC1, PAK4, PAPD4, PARD3, PARN, PARP14, PARP4, PARVB, PCBP2, PCBP4, PCDHGB3, PCGF3, PCM1, PCMTD2, PCNXL2, PCSK9, PDE4A, PDE7A, PDLIM7, PDXDC1, PEPD, PEX5, PFKP, PHF19, PHF8, PHRF1, PHTF2, PI4K2A, PIEZO1, PIGU, PIK3C2B, PITPNA, PITPNB, PITPNM1, PLAU, PLEC, PLEKHB2, PLSCR3, PLXNB2, PLXNC1, PMS1, POLE3, POLR3D, POSTN, POU2F1, PPAPDC1A, PPARA, PPHLN1, PPIP5K1, PPP1R12A, PPP6R1, PPP6R2, PRKACB, PRKDC, PRMT1, PRNP, PRSS23, PSMA4, PSMC1, PSMD6, PTK2B, PTPN14, PUF60, PUS7, PVR, PXN, QKI, RAB23, RAB2B, RAB34, RAD1, RAD23B, RALB, RAPlA, RAP1GDS1, RARG, RASSF8, RBCK1, RBFOX2, RBM10, RCC1, RFTN1, RFWD2, RGS10, RGS3, RIF1, RNF14, RNF19A, RNF38, RNFT1, RPL10, RPS6KC1, RRBP1, RWDD4, SAMD9, SAMD9L, SAR1A, SART3, SCAF4, SCAF8, SCD, SCLT1, SCO1, SDCBP, SEC14L1, SEC22A, SEC24B, SEC61A1, SEPT9, SERPINE2, SF1, SGOL2, SH3RF1, SKIL, SLC25A17, SLC39A3, SLC41A1, SLC4A4, SLC7A6, SLC7A8, SMARCA4, SMARCC2, SMC4, SMC6, SMCHD1, SMG1, SMN2, SMPD4, SMYD3, SMYD5, SNAP23, SNHG16, SNX14, SOCS2, SON, SOS2, SPATA20, SPATS2, SPG20, SPRED2, SQLE, SQRDL, SQSTM1, SRCAP, SREBF1, SREK1, SRSF3, STARD4, STAT1, STAT3, STAU1, STC2, STEAP2, STRIP1, STRN3, STX16, SUPT20H, SYNE1, SYNE2, SYT15, SYTL2, TACC1, TAF2, TANC2, TARBP1, TARS, TBC1D15, TBL2, TCF7L2, TENC1, TENM2, TEP1, TET3, TFCP2, TGFB1, TGFBR1, TGFBRAP1, THADA, THAP4, THRB, TIMP2, TJP2, TLE3, TLK1, TMEM154, TMEM47, TMEM63A, TNC, TNFAIP3, TNFRSF12A, TNIP1, TNKS1BP1, TNPO3, TNS1, TNS3, TOE1, TOMM40, TOMM5, TOPORS, TP531NP1, TRAF3, TRAK1, TRAPPC12, TRIB1, TRIM2, TRIM23, TRIM26, TRIM28, TRIM65, TRMT1L, TRPS1, TSC2, TSHZ1, TSPAN2, TTC7A, TUBB2C, TUBB3, TXNL1, TXNRD1, U2SURP, UBAP2L, UBE2G2, UBE2V1, UBQLN4, UCHL5, UHMK1, UHRF1BP1L, UNC5B, USP19, USP7, VANGL1, VARS2, VCL, VIPAS39, VPS13A, VPS29, VPS51, VWA8, WDR19, WDR37, WDR48, WIPF1, WNT5B, WSB1, WWTR1, XIAP, XRN2, YAP1, YES1, YPEL5, YTHDF3, Z24749, ZAK, ZBTB10, ZBTB24, ZBTB7A, ZC3H12C, ZC3H14, ZC3H18, ZCCHC11, ZEB1, ZEB2, ZFAND1, ZFAND5, ZHX3, ZMIZ1, ZMYM2, ZNF12, ZNF148, ZNF219, ZNF227, ZNF24, ZNF268, ZNF28, ZNF281, ZNF335, ZNF37A, ZNF37BP, ZNF395, ZNF583, ZNF621, ZNF652, ZNF655, ZNF674, ZNF74, ZNF764, ZNF778, ZNF780A, ZNF827, ZNF839 or ZNF91.

[2038] In a specific embodiment of the foregoing aspect, the gene is: ABCB8, ANKRD36, APLP2, ARHGAP12, ARMCX6, ASAP1, ATG5, AXIN1, BIRC6, C1orf86, CDC42BPA, CLTA, DYRK1A, ERGIC3, FBXL6, FOXM1, GGCT, KAT6B, KDM6A, KIF3A, KMT2D, LARP7, LYRM1, MADD, MAN2C1, MRPL55, MYCBP2, MYO9B, PNISR, RAP1A, RAPGEF1, SENP6, SH3YL1, SLC25A17, SMN2, SREK1, STRN3, TAF2, TMEM134, VPS29, ZFAND1 or ZNF431.

[2039] In another specific embodiment of the foregoing aspect, the gene is: ABCB8, ANKRD36, ARHGAP12, ARMCX6, ATG5, BIRC6, C1orf86, CLTA, DYRK1A, FBXL6, KAT6B, KDM6A, KMT2D, LYRM1, MAN2C1, MRPL55, MYCBP2, PNISR, RAPGEF1, SENP6, SH3YL1, TMEM134 or ZNF431.

[2040] In another specific embodiment of the foregoing aspect, the gene is: ABCA10, ABCC1, ACTA2, ADAL, ADAM12, ADAMTS1, ADAMTS5, ADD1, ADGRG6, ADH6, ADHFE1, AFF2, AFF3, AGK, AGPS, AKAP3, ANK1, ANK2, ANK3, ANKRD33B, ANXA11, ANXA6, AP4B1-AS1, ARHGEF16, ARID5B, ARL9, ARMCX3, ASAP1, ASIC1, ATP2A3, B3GALT2, B3GNT6, BCL2L15, BCYRN1, BIN3-IT1, BIRC3, BTG2, C10orf54, C11orf70, C11orf73, C11orf94, C12orf56, C19orf47, C3, C4orf27, C7orf31, C8orf34, CA13, CA3, CACNA2D2, CACNB1, CADM1, CAND2, CCDC79, CCER2, CCNF, CDCA7, CDKAL1, CELSR1, CEMIP, CEP170, CFH, CIITA, CLDN23, CMAHP, CNGA4, CNTD1, COL11A1, COL12A1, COL14A1, COL15A1, COL5A1, COL5A3, COL6A6, COL8A1, COLEC12, COMP, CPA4, CPQ, CRISPLD2, CRLF1, CRYL1, CUX1, CYB5B, CYB5R2, CYGB, CYP1B1, DCLK1, DCN, DDTT4L, DDX42, DDX50, DEGS1, DENND1A, DENND5A, DEPTOR, DFNB59, DGKA, DHFR, DIAPH3, DIRAS3, DIS3L, DLG5, DNAH8, DNAJC27, DOCK1, DOCK11, DYNC1I1, DZIP1L, EBF1, EFEMP1, EGR3, EIF2B3, ELN, ELP4, EMX2OS, ENPP1, ERCC8, ESM1, EVC2, F2R, FAM160A1, FAM198B, FAM20A, FAM46B, FAM65B, FAP, FARP1, FBLN2, FBN2, FBXO9, FCHO1, FER, FGFR2, FGL2, FLT1, FRAS1, FSCN2, GAL3ST4, GALC, GALNT15, GATA6, GBGT1, GCNT1, GDF6, GNAQ, GOLGB1, GPR183, GPR50, GPRC5A, GPRC5B, GRTP1, GUCA1B, GXYLT1, HAPLN1, HAPLN2, HAS3, HAVCR2, HDAC5, HECTD2-AS1, HEPH, HEY1, HLTF, HMGN3-AS1, HMOX1, HOOK3, HSD17B12, HSPA1L, HTATIP2, HTT, IGDCC4, IGF2R, IGFBP3, IL16, INA, INTU, IQCG, ITGA11, ITGA8, ITGB8, ITIH1, ITPKA, KCNS1, KCNS2, KDM6A, KDSR, KIAA1456, KIAA1462, KIAA1524, KIAA1715, KIAA1755, KIT, KLF17, KLRG1, KRT7, KRTAP1-1, KRTAP1-5, L3MBTL2, LAMB2P1, LGI2, LGR4, LHX9, LINC00472, LINC00570, LINC00578, LINC00607, LINC00678, LINC00702, LINC00886, LINC00961, LINC01011, LINC01118, LINC01204, LMOD1, LRBA, LRP4, LRRC32, LRRC39, LSAMP, LUM, LYPD1, LYRM1, MAFB, MAMDC2, MAN1 A2, MAN2A1, MAPK13, MASP1, MB, MC4R, MEDAG, MEGF6, MEMO1, MIAT, MIR612, MLLT10, MMP10, MMP24, MMS19, MN1, MOXD1, MRVI1, MSH4, MTERF3, MXRA5, MYO1D, NA, NAALADL2, NAE1, NAGS, NDNF, NEURLIB, NGFR, NHLH1, NLN, NOTCH3, NOTUM, NOVA2, NOX4, NRROS, NTNG1, OCLN, OLR1, OSBPL10, OXCT2, PAIP2B, PAPD4, PBLD, PCM1, PDE1C, PDE5A, PDGFD, PDGFRB, PDS5B, PDXDC1, PEAR1, PEPD, PHACTR3, PI4K2B, PIK3R1, PIM2, PITPNB, PITPNM3, PLAU, PLEK2, PLEKHA6, PLEKHH2, PLXNC1, PMS1, PODN, POLN, POLR1AA, POSTN, PPM1E, PPP3CA, PRKCA, PRKDC, PRKG1, PRPH2, PRRG4, PRUNE2, PSMD6-AS2, PTGIS, PTX3, RAB30, RAB38, RAB44, RAD9B, RARS, RBBP8, RBKS, RCC1, RDX, RFWD2, RFX3-AS1, RGCC, RNFT1, ROR1, ROR2, RWDD4, SCARNA9, SCO1, SEC22A, SHROOM3, SIGLEC10, SLC24A3, SLC35F3, SLC39A10, SLC46A2, SLC4A11, SLC6A15, SLC7A11, SLC9A3, SLIT3, SMG1P3, SMTN, SMYD3, SNED1, SORBS2, SORCS2, SOX7, SPDYA, SPEF2, SQRDL, STAC2, STAT1, STAT4, STEAP2, STK32B, STRN4, STS, STXBP6, SULF1, SVEP1, SYNGR2, SYNPO, SYNPO2, SYNPO2L, TAGLN3, TANGO6, TARBP1, TEX21P, TGFA, TGFB2, TGFB3, TGM2, THADA, THBS2, THRB, TMEM102, TMEM119, TMEM256-PLSCR3, TMEM50B, TNC, TNFAIP8L3, TNFRSF14, TNRC18P1, TNS3, TNXB, TP53AIP1, TPRG1, TRAF3, TRIM66, TRPC4, TSHZ2, TSPAN11, TSPAN18, TSPAN7, TSSK3, TXNIP, UNC5B, USP27X, UVRAG, VIM-AS1, VPS41, VSTM2L, VWA8, VWF, WDR91, WISP1, WNT10B, XRN2, YDJC, ZBTB26, ZCCHC5, ZFP82, ZMIZ1-AS1, ZNF212, ZNF350, ZNF660, ZNF79 or ZNF837.

[2041] In another specific embodiment of the foregoing aspect, the gene is: ABCA10, ACTA2, ADAL, ADAMTS1, ADAMTS5, ADD1, ADGRG6, ADH6, ADHFE1, AFF3, AKAP3, ANK1, ANK3, ANKRD33B, AP4B1-AS1, ARHGEF16, ARID5B, ARL9, ASIC1, ATP2A3, B3GALT2, B3GNT6, BCL2L15, BCYRN1, BIN3-IT1, BIRC3, BTG2, C10orf54, C11orf70, C11orf94, C12orf56, C19orf47, C3, C7orf31, C8orf34, CA13, CA3, CACNA2D2, CACNB1, CADM1, CAND2, CCDC79, CCER2, CCNF, CELSR1, CEMIP, CEP170, CFH, CIITA, CLDN23, CMAHP, CNGA4, CNTD1, COL11A1, COL14A1, COL15A1, COL5A1, COL5A3, COL6A6, COL8A1, COLEC12, COMP, CPA4, CPQ, CRISPLD2, CRLF1, CRYL1, CYB5R2, CYGB, CYP1B1, DCLK1, DCN, DDIT4L, DDX50, DEGS1, DEPTOR, DFNB59, DIRAS3, DLG5, DNAH8, DNAJC27, DOCK11, DYNC1I1, DZIP1L, EFEMP1, EGR3, ELN, ELP4, EMX2OS, ENPP1, ERCC8, ESM1, EVC2, F2R, FAM160A1, FAM20A, FAM46B, FAM65B, FAP, FARP1, FBLN2, FBN2, FBXO9, FCHO1, FGFR2, FGL2, FLT1, FRAS1, FSCN2, GAL3ST4, GALNT15, GATA6, GBGT1, GCNT1, GDF6, GNAQ, GPR183, GPR50, GPRC5A, GPRC5B, GRTP1, GUCA1B, GXYLT1, HAPLN1, HAPLN2, HA S3, HAVCR2, HDAC5, HECTD2-AS1, HEPH, HEY1, HMGN3-AS1, HOOK3, HSPA1L, HTATIP2, IGDCC4, IGF2R, IGFBP3, IL16, INA, INTU, IQCG, ITGA11, ITGA8, ITGB8, ITIH1, ITPKA, KCNS1, KCNS2, KDM6A, KDSR, KIAA1456, KIAA1462, KIAA1755, KIT, KLF17, KLRG1, KRT7, KRTAP1-1, KRTAP1-5, L3MBTL2, LAMB2P1, LGI2, LGR4, LHX9, LINC00472, LINC00570, LINC00578, LINC00607, LINC00678, LINC00702, LINC00886, LINC00961, LINC01011, LINC01118, LINC01204, LMOD1, LRBA, LRP4, LRRC32, LRRC39, LSAMP, LUM, LYPD1, MAFB, MAMDC2, MAN2A1, MAPK13, MASP1, MB, MC4R, MEGF6, MIAT, MIR612, MLLT10, MMP10, MMP24, MN1, MOXD1, MRVI1, MSH4, MTERF3, MXRA5, NA, NAALADL2, NAE1, NAGS, NDNF, NGFR, NHLH1, NLN, NOTCH3, NOTUM, NOVA2, NOX4, NRROS, OCLN, OLR1, OSBPL10, OXCT2, PAIP2B, PBLD, PDE1C, PDE5A, PDGFD, PDGFRB, PDS5B, PEAR1, PHACTR3, PI4K2B, PIK3R1, PIM2, PITPNM3, PLEK2, PLEKHA6, PLEKHH2, PODN, POLN, POLR1A, PPM1E, PPP3CA, PRKCA, PRKG1, PRPH2, PRRG4, PRUNE2, PSMD6-AS2, PTGIS, PTX3, RAB30, RAB38, RAB44, RAD9B, RARS, RBBP8, RBKS, RDX, RFX3-AS1, RGCC, ROR1, ROR2, SCARNA9, SHROOM3, SIGLEC10, SLC24A3, SLC35F3, SLC39A10, SLC46A2, SLC4A11, SLC6A15, SLC7A11, SLC9A3, SLIT3, SMG1P3, SMTN, SNED1, SORBS2, SORCS2, SOX7, SPDYA, SPEF2, STAC2, STAT4, STK32B, STRN4, STS, STXBP6, SULF1, SVEP1, SYNGR2, SYNPO, SYNPO2, SYNPO2L, TAGLN3, TANGO6, TEX21P, TGFA, TGFB2, TGFB3, TGM2, THBS2, TMEM102, TMEM119, TMEM256-PLSCR3, TMEM50B, TNFAIP8L3, TNFRSF14, TNRC18P1, TNXB, TP53AIP1, TPRG1, TRIM66, TRPC4, TSHZ2, TSPAN11, TSPAN18, TSPAN7, TSSK3, TXNIP, USP27X, UVRAG, VIM-AS1, VPS41, VSTM2L, VWF, WDR91, WISP1, WNT10B, YDJC, ZBTB26, ZCCHC5, ZFP82, ZMIZ1-AS1, ZNF212, ZNF350, ZNF660, ZNF79 or ZNF837.

[2042] In another specific embodiment of the foregoing aspect, as listed in Table 7, the gene is ABCB8, ABCC3, ADAM17, ADCY3, AGPAT4, ANKRA2, ANXA11, APIP, APLP2, APLP2, ARHGAP1, ARL15, ASAP1, ASPH, ATAD2B, ATXN1, AXIN1, BECN1, BHMT2, BICD1, BTN3A1, C11orf30, C11orf73, C12orf4, C14orf132, C8orf44, C8orf44-SGK3, C8orf8, CASC3, CASP7, CCDC122, CDH13, CECR7, CENPI, CEP112, CEP192, CHEK1, CMAHP, CNRIP1, COPS7B, CPSF4, CRISPLD2, CRYBG3, CSNK1E, CSNK1G1, DAGLB, DCAF17, DCUN1D4, DDX42, DENND1A, DENND5A, DGKA, DHFR, DIAPH3, DLGAP4, DNAJC13, DNMBP, DOCK1, DYRK1A, EIF2B3, ENAH, ENOX1, EP300, ERC1, ERCC1, ERGIC3, ERLIN2, ERRFI1, EVC, FAF1, FAIM, FAM126A, FAM13A, FAM162A, FAM174A, FAM198B, FBN2, FER, FHOD3, FOCAD, GALC, GCFC2, GGACT, GGCT, GLCE, GOLGA4, GOLGB1, GPSM2, GULP1, GXYLT1, HAT1, HDX, HLTF, HMGA2, HNMT, HPS1, HSD17B12, HSD17B4, HTT, IFT57, INPP5K, IVD, KDM6A, KIAA1524, KIAA1715, LETM2, LOC400927, LRRC42, LUC7L3, LYRM1, MADD, MB21D2, MCM10, MED13L, MEDAG, MEMO1, MFN2, MMS19, MRPL45, MRPS28, MTERF3, MYCBP2, MYLK, MYOF, NGF, NREP, NSUN4, NT5C2, OSMR, OXCT1, PAPD4, PCM1, PDE7A, PDS5B, PDXDC1, PIGN, PIK3CD, PIK3R1, PIKFYVE, PITPNB, PLEKHA1, PLSCR1, PMS1, POMT2, PPARG, PPHLN1, PPIP5K2, PPP1R26, PRPF31, PRSS23, PRUNE2, PSMA4, PXK, RAF1, RAPlA, RAPGEF1, RARS2, RBKS, RERE, RFWD2, RNFT1, RPA1, RPS10, RPS6KB2, SAMD4A, SAR1A, SCO1, SEC24A, SENP6, SERGEF, SGK3, SH3YL1, SKA2, SLC12A2, SLC25A17, SLC44A2, SMYD3, SNAP23, SNHG16, SNX7, SOS2, SPATA18, SPATA5, SP1DR, SPRYD7, SRGAP1, SRRM1, STAT1, STRN3, STXBP6, SUPT20H, TAF2, TASP1, TBC1D15, TCF12, TCF4, TIAM1, TJP2, TMC3, TMEM189-UBE2V1, TMEM214, TNRC6A, TNS3, TOE1, TRAF3, TRIM65, TSPAN2, TTC7B, TUBE1, TYW5, UBAP2L, UBE2V1, URGCP, VAV2, VPS29, WDR27, WDR37, WDR91, WNK1, XRN2, ZCCHC8, ZFP82, ZNF138, ZNF232, ZNF37BP or ZNF680.

[2043] In another specific embodiment of the foregoing aspect, the gene is ABCB8, ABCC3, ADAM17, ADCY3, AGPAT4, ANKRA2, ANXA11, APIP, APPL2, ARHGAP1, ARL15, ASAP1, ASPH, ATAD2B, ATXN1, BECN1, BHMT2, BICD1, BTN3A1, C11orf30, C11orf73, C12orf4, C14orf132, C8orf44, C8orf44-SGK3, C8orf88, CASC3, CASP7, CCDC122, CDH13, CECR7, CENPI, CEP112, CEP192, CHEK1, CMAHP, CNRIP1, COPS7B, CPSF4, CRISPLD2, CRYBG3, CSNK1E, CSNK1G1, DCAF17, DCUN1D4, DDX42, DENND1A, DENND5A, DGKA, DHFR, DIAPH3, DNAJC13, DNMBP, DOCK1, DYRK1A, EIF2B3, ENAH, ENOX1, EP300, ERC1, ERLIN2, ERRFI1, EVC, FAF1, FAIM, FAM126A, FAM13A, FAM162A, FAM174A, FBN2, FER, FHOD3, FOCAD, GALC, GCFC2, GGACT, GLCE, GOLGA4, GOLGB1, GPSM2, GULP1, GXYLT1, HDX, HLTF, HMGA2, HNMT, HSD17B12, HSD17B4, HTT, 1FT57, IVD, KDM6A, KIAA1524, KIAA1715, LETM2, LOC400927, LRRC42, LUC7L3, LYRM1, MB21D2, MCM10, MED13L, MEDAG, MEMO1, MFN2, MMS19, MRPL45, MRPS28, MTERF3, MYCBP2, MYLK, MYOF, NGF, NREP, NSUN4, NT5C2, OSMR, OXCT1, PAPD4, PCM1, PDE7A, PDS5B, PDXDC1, PIGN, PIK3CD, PIK3R1, PIKFYVE, PITPNB, PLEKHA1, PLSCR1, PMS1, POMT2, PPARG, PPIP5K2, PPP1R26, PRPF31, PRSS23, PSMA4, PXK, RAF1, RAPGEF1, RARS2, RBKS, RERE, RFWD2, RPA1, RPS10, SAMD4A, SAR1A, SCO1, SEC24A, SENP6, SERGEF, SGK3, SLC12A2, SLC25A17, SLC44A2, SMYD3, SNAP23, SNHG16, SNX7, SOS2, SPATA5, SPIDR, SPRYD7, SRGAP1, SRRM1, STAT1, STXBP6, SUPT20H, TAF2, TASP1, TBC1D15, TCF12, TCF4, TIAM1, TJP2, TMC3, TMEM214, TNRC6A, TNS3, TOE1, TRAF3, TSPAN2, TTC7B, TYW5, UBAP2L, URGCP, VAV2, WDR27, WDR37, WDR91, WNK1, XRN2, ZCCHC8, ZFP82, ZNF138, ZNF232 or ZNF37BP.

[2044] In another specific embodiment of the foregoing aspect, the gene is APLP2, AXIN1, CECR7, DAGLB, DLGAP4, ERCC1, ERGIC3, FAM198B, GGCT, HAT1, HPS1, INPP5K, MADD, PPHLN1, PRUNE2, RAPlA, RNFT1, RPS6KB2, SH3YL1, SKA2, SPATA18, STRN3, TMEM189-UBE2V1, TRIM65, TUBE1, UBE2V1, VPS29 or ZNF680.

[2045] In another specific embodiment of the foregoing aspect, the gene is ABCB8, ABCC3, ADCY3, AGPAT4, ANKRA2, APIP, ARHGAP1, ARL15, ATXN1, BECN1, BHMT2, BTN3A1, C12orf4, C14orf132, C8orf44, C8orf44-SGK3, C8orf88, CASP7, CCDC122, CECR7, CENPI, CEP112, CEP192, CHEK1, CMAHP, CNRIP1, CPSF4, CRISPLD2, CRYBG3, CSNK1E, CSNK1G1, DAGLB, DCAF17, DLGAP4, DNAJC13, DNMBP, DYRK1A, ENAH, EP300, ERCC1, ERLIN2, ERRFI1, EVC, FAIM, FAM126A, FAM13A, FAM162A, FAM174A, FBN2, GGACT, GLCE, GULP1, GXYLT1, HDX, HMGA2, HNMT, HPS1, IFT57, INPP5K, IVD, KDM6A, LETM2, LOC400927, LRRC42, LYRM1, MB21D2, MCM10, MED13L, MFN2, MRPL45, MRPS28, MTERF3, MYCBP2, NGF, OXCT1, PDS5B, PIGN, PIK3CD, PIK3R1, PIKFYVE, PLEKHA1, PLSCR1, POMT2, PPARG, PPIP5K2, PPP1R26, PRPF31, PRUNE2, PXK, RAF1, RAPGEF1, RARS2, RBKS, RERE, RPA1, RPS10, RPS6KB2, SAMD4A, SEC24A, SENP6, SERGEF, SGK3, SH3YL1, SKA2, SLC12A2, SLC44A2, SNX7, SPATA18, SPATA5, SPIDR, SPRYD7, SRGAP1, SRRM1, STXBP6, TASP1, TCF12, TCF4, TIAM1, TMC3, TMEM189-UBE2V1, TMEM214, TNRC6A, TTC7B, TUBE1, TYW5, URGCP, VAV2, WDR27, WDR91, WNK1, ZCCHC8, ZFP82, ZNF138, ZNF232 or ZNF680.

[2046] In another particular aspect, provided herein are methods for modulating the amount of one, two, three or more RNA transcripts of a gene in a subject, wherein the precursor RNA transcript transcribed from the gene comprises an intronic REMS (for example, an endogenous intronic REMS or a non-endogenous intronic REMS), the methods comprising administering to the subject a compound of Formula (I) or a form thereof, or a pharmaceutical composition comprising a compound of Formula (I) or a form thereof and a pharmaceutically acceptable carrier, excipient or diluent. In a specific embodiment, the precursor RNA transcript contains in 5′ to 3′ order: a branch point, a 3′ splice site and an intronic REMS.

[2047] In another particular aspect, provided herein are methods for modulating the amount of one, two, three or more RNA transcripts of a gene in a subject, wherein the precursor RNA transcript transcribed from the gene comprises a non-endogenous intronic REMS, the methods comprising administering to the subject a compound of Formula (I) or a form thereof, or a pharmaceutical composition comprising a compound of Formula (I) or a form thereof and a pharmaceutically acceptable carrier, excipient or diluent. In a specific embodiment, the precursor RNA transcript contains in 5′ to 3′ order: a branch point, a 3′ splice site and an intronic REMS.

[2048] In another embodiment, provided herein are methods for modulating the amount of one, two, three or more RNA transcripts of a gene, wherein the precursor RNA transcript transcribed from the gene comprises an intronic REMS, the methods comprising administering to a human or non-human subject a compound of Formula (I) or a form thereof, or a pharmaceutical composition comprising a compound of Formula (I) or a form thereof and a pharmaceutically acceptable carrier, excipient or diluent. In a specific embodiment, the precursor RNA transcript contains in 5′ to 3′ order: a branch point, a 3′ splice site and an intronic REMS.

[2049] In another embodiment, provided herein is a method for modulating the amount of a product of a gene (such as an RNA transcript or a protein) in a subject, wherein the gene comprises a DNA nucleotide sequence encoding two exons and an intron, wherein the nucleotide sequence encoding one exon is upstream of the nucleotide sequence encoding the intron and the nucleotide sequence encoding the other exon is downstream of the nucleotide sequence encoding the intron, wherein the DNA nucleotide sequence encoding the intron comprises in 5′ to 3′ order: a nucleotide sequence encoding a first 5′ splice site, a nucleotide sequence encoding a first branch point, a nucleotide sequence encoding a first 3′ splice site, an iREMS, a nucleotide sequence encoding a second branch point and a nucleotide sequence encoding a second 3′ splice site, wherein the iREMS comprises a DNA sequence GAgtrngn (SEQ ID NO: 4), and wherein r is adenine or guanine and n is any nucleotide, the method comprising administering a compound described herein (for example, a compound of Formula (I) or a form thereof) to the subject.

[2050] In another embodiment, provided herein is a method for modulating the amount of a product of a gene (such as an RNA transcript or protein) in a subject, wherein the gene comprises a DNA nucleotide sequence encoding two exons and an intron, wherein the nucleotide sequence encoding one exon is upstream of the nucleotide sequence encoding the intron and the nucleotide sequence encoding the other exon is downstream of the nucleotide sequence encoding the intron, wherein the DNA nucleotide sequence of the intron comprises in 5′ to 3′ order: an iREMS, a nucleotide sequence encoding a first branch point and a nucleotide sequence encoding a first 3′ splice site, wherein the iREMS comprises a DNA sequence GAgtrngn (SEQ ID NO: 4), and wherein r is adenine or guanine and n is any nucleotide, the method comprising administering a compound described herein (for example, a compound of Formula (I) or a form thereof) to the subject.

[2051] In another embodiment, provided herein is a method for modulating the amount of a product of a gene (such as an RNA transcript or protein) in a subject, wherein the gene comprises a DNA nucleotide sequence encoding two exons and an intron, and wherein the DNA nucleotide sequence comprises exonic and intronic elements illustrated in FIG. 1A, the method comprising administering a compound described herein (for example, a compound of Formula (I) or a form thereof) to the subject.

[2052] In another embodiment, provided herein is a method for modulating the amount of a product of a gene (such as an RNA transcript or protein) in a subject, wherein the gene comprises a DNA nucleotide sequence encoding two exons and an intron, and wherein the DNA nucleotide sequence comprises exonic and intronic elements illustrated in FIG. 1B, the method comprising administering a compound described herein (for example, a compound of Formula (I) or a form thereof) to the subject.

[2053] In another embodiment, provided herein is a method for modulating the amount of a product of a gene (such as an RNA transcript or protein) in a subject, wherein the gene comprises a DNA nucleotide sequence encoding two exons and an intron, and wherein the DNA nucleotide sequence comprises exonic and intronic elements illustrated in FIG. 1C, the method comprising administering a compound described herein (for example, a compound of Formula (I) or a form thereof) to the subject.

[2054] In a specific embodiment, the gene is a gene described in a table in this disclosure.

[2055] In another embodiment, provided herein are methods for modulating the amount of one, two, three or more RNA transcripts of a gene, disclosed in Table 7, infra, comprising administering to a human or non-human subject a compound of Formula (I) or a form thereof, or a pharmaceutical composition comprising a compound of Formula (I) or a form thereof and a pharmaceutically acceptable carrier, excipient or diluent. See the example section for additional information regarding the genes in Table 7. In a specific embodiment, the RNA transcript contains in 5′ to 3′ order: a branch point, a 3′ splice site and an intronic REMS. In a specific embodiment, the method for modulating the amount of one or more RNA transcripts of a gene using a compound of Formula (I) or a form thereof is as described in the Examples described herein.

[2056] In certain embodiments, a compound of Formula (I) or a form thereof contacted or cultured with a cell(s), or administered to a subject is a compound of Formula (II), Formula (11), Formula (IV), Formula (V), Formula (VI), Formula (VII), Formula (VIII), Formula (IX), Formula (X), Formula (XI), Formula (XII), Formula (XIII), or Formula (XIV). In some embodiments, a compound of Formula (I) or a form thereof contacted or cultured with a cell(s), or administered to a subject is a compound described herein.

[2057] Table 1 shows certain genes that are expected to demonstrate an effect on inclusion of an iExon with a corresponding change in isoform abundance as a result of iExon generation in RNA having intronic REMS elements in the presence of a compound as described herein. The change in abundance is expected to have a statistically significant p value.

TABLE 1
Table 1

ABCA1, ABCA10, ABCB7, ABCB8, ABCC1, ABCC3, ABHD10, ABL2, ABLIM3,
ACACA, ACADVL, ACAT2, ACTA2, ADAL, ADAM12, ADAM15, ADAM17, ADAM33,
ADAMTS1, ADCY3, ADD1, ADGRG6, ADH6, ADHFE1, AFF2, AFF3, AGK, AGPAT3,
AGPAT4, AGPS, AHCYL2, AHDC1, AHRR, AJUBA, AK021888, AK310472, AKAP1,
AKAP3, AKAP9, AKNA, ALCAM, ALDH4A1, AMPD2, ANK1, ANK2, ANK3, ANKFY1,
ANKHD1-EIF4EBP3, ANKRA2, ANKRD17, ANKRD33B, ANKRD36, ANKS6, ANP32A,
ANXA11, ANXA6, AP2B1, AP4B1-AS1, APAF1, APIP, APLP2, APP, APPL2, APTX,
ARHGAP1, ARHGAP12, ARHGAP22, ARHGEF16, ARID1A, ARID2, ARID5B, ARL9,
ARL15, ARMCX3, ARMCX6, ASAP1, ASIC1, ASL, ASNS, ASPH, ATAD2B, ATF7IP,
ATG5, ATG9A, ATMIN, ATP2A3, ATP2C1, ATXN1, ATXN3, AURKA, AXIN1,
B3GALT2, B3GNT6, B4GALT2, BACE1, BAG2, BASP1, BC033281, BCAR3, BCL2L15,
BCYRN1, BECN1, BEND6, BHMT2, BICD1, BIN1, BIN3-IT1, BIRC3, BIRC6, BNC1,
BRD2, BRPF1, BSCL2, BTBD10, BTG2, BTN3A1, BZW1, C1orf86, C10orf54, C11orf30,
C11orf70, C11orf73, C11orf94, C12orf4, C12orf56, C14orf132, C17orf76-AS1, C19orf47,
C3, C4orf27, C5orf24, C6orf48, C7orf31, C8orf34, C8orf44, C8orf44-SGK3, C8orf88,
C9orf69, CA13, CA3, CAB39, CACNA2D2, CACNB1, CADM1, CALU, CAMKK1,
CAND2, CAPNS1, CASC3, CASP7, CASP8AP2, CAV1, CCAR1, CCDC77, CCDC79,
CCDC88A, CCDC92, CCDC122, CCER2, CCNF, CCT6A, CD276, CD46, CDC25B,
CDC40, CDC42BPA, CDCA7, CDH11, CDH13, CDK11B, CDK16, CDKAL1, CECR7,
CELSR1, CEMIP, CENPI, CEP112, CEP170, CEP192, CEP68, CFH, CFLAR, CHD8,
CHEK1, CIITA, CIZ1, CLDN23, CLIC1, CLK4, CLTA, CMAHP, CNGA4, CNOT1,
CNRIP1, CNTD1, COG1, COL1A1, COL11A1, COL12A1, COL14A1, COL15A1, COL5A1,
COL5A3, COL6A1, COL6A6, COL8A1, COLEC12, COMP, COPS7B, CPA4, CPEB2, CPQ,
CPSF4, CREB5, CRISPLD2, CRLF1, CRLS1, CRTAP, CRYBG3, CRYL1, CSDE1,
CSNK1A1, CSNK1E, CSNK1G1, CTDSP2, CTNND1, CUL2, CUL4A, CUX1, CYB5B,
CYB5R2, CYBRD1, CYGB, CYP1B1, CYP51A1, DAB2, DACT1, DAGLB, DARS, DAXX,
DCAF10, DCAF11, DCAF17, DCBLD2, DCLK1, DCN, DCUN1D4, DDAH1, DDAH2,
DDHD2, DDIT4L, DDR1, DDX39B, DDX42, DDX50, DEGS1, DENND1A, DENND1B,
DENND5A, DEPTOR, DFNB59, DGCR2, DGKA, DHCR24, DHCR7, DHFR, DHX9,
DIAPH1, DIAPH3, DIRAS3, DIS3L, DKFZp434M1735, DKK3, DLC1, DLG5, DLGAP4,
DNAH8, DNAJC13, DNAJC27, DNM2, DNMBP, DOCK1, DOCK11, DPP8, DSEL, DST,
DSTN, DYNC1I1, DYRK1A, DZIP1L, EBF1, EEA1, EEF1A1, EFCAB14, EFEMP1, EGR1,
EGR3, EHMT2, EIF2B3, EIF4G1, EIF4G2, EIF4G3, ELF2, ELN, ELP4, EMX2OS, ENAH,
ENG, ENPP1, ENPP2, ENSA, EP300, EPN1, EPT1, ERC1, ERCC1, ERCC8, ERGIC3,
ERLIN2, ERRFI1, ESM1, ETV5, EVC, EVC2, EXO1, EXTL2, EYA3, F2R, FADS1, FADS2,
FAF1, FAIM, FAM111A, FAM126A, FAM13A, FAM160A1, FAM162A, FAM174A,
FAM198B, FAM20A, FAM219A, FAM219B, FAM3C, FAM46B, FAM65A, FAM65B, FAP,
FARP1, FBLN2, FBN2, FBXO9, FBXL6, FBXO10, FBXO18, FBXO31, FBXO34, FBXO9,
FCHO1, FDFT1, FDPS, FER, FEZ1, FGD5-AS1, FGFR2, FGFRL1, FGL2, FHOD3, FLII,
FLNB, FLT1, FN1, FNBP1, FOCAD, FOS, FOSB, FOSL1, FOXK1, FOXM1, FRAS1,
FSCN2, FUS, FYN, GABPB1, GAL3ST4, GALC, GALNT1, GALNT15, GAS7, GATA6,
GBA2, GBGT1, GCFC2, GCNT1, GDF6, GGACT, GGCT, GHDC, GIGYF2, GJC1, GLCE,
GMIP, GNA13, GNAQ, GNAS, GNL3L, GOLGA2, GOLGA4, GOLGB1, GORASP1, GPR1,
GPR183, GPR50, GPR89A, GPRC5A, GPRC5B, GPSM2, GREM1, GRK6, GRTP1, GSE1,
GTF2H2B, GUCA1B, GULP1, GXYLT1, HAPLN1, HAPLN2, HAS2, HAS3, HAT1,
HAUS3, HAUS6, HAVCR2, HDAC5, HDAC7, HDX, HECTD2-AS1, HEG1, HEPH, HEY1,
HLA-A, HLA-E, HLTF, HMGA1, HMGA2, HMGB1, HMGCR, HMGN3-AS1, HMGCS1,
HOOK3, HMOX1, HNMT, HNRNPR, HNRNPUL1, HP1BP3, HPS1, HRH1, HSD17B12,
HSD17B4, HSPA1L, HTATIP2, HTT, IARS, IDH1, IDI1, IFT57, IGDCC4, IGF2BP2,
IGF2R, IGFBP3, IL16, IL6ST, INA, INHBA, INPP5K, INSIG1, INTU, IQCE, IQCG,
ITGA11, ITGA8, ITGAV, ITGB5, ITGB8, ITIH1, ITM2C, ITPKA, ITSN1, IVD, KANSL3,
KAT6B, KCNK2, KCNS1, KCNS2, KDM6A, KDSR, KIAA1033, KIAA1143, KIAA1199,
KIAA1456, KIAA1462, KIAA1522, KIAA1524, KIAA1549, KIAA1715, KIAA1755, KIF14,
KIF2A, KIF3A, KIT, KLC1, KLC2, KLF17, KLF6, KLHL7, KLRG1, KMT2D, KRT7,
KRT18, KRT19, KRT34, KRTAP1-1, KRTAP1-5, KRTAP2-3, L3MBTL2, LAMA2,
LAMB1, LAMB2P1, LARP4, LARP7, LATS2, LDLR, LEMD3, LETM2, LGALS8, LGI2,
LGR4, LHX9, LIMS1, LINC00341, LINC00472, LINC00570, LINC00578, LINC00607,
LINC00657, LINC00678, LINC00702, LINC00886, LINC00961, LINC01011, LINC01118,
LINC01204, LMAN2L, LMO7, LMOD1, LOC400927, LONP1, LOX, LRBA, LRCH4,
LRIG1, LRP4, LRP8, LRRC32, LRRC39, LRRC42, LRRC8A, LSAMP, LSS, LTBR,
LUC7L2, LUM, LYPD1, LYRM1, LZTS2, MADD, MAFB, MAGED4, MAGED4B,
MAMDC2, MAN1A2, MAN2A1, MAN2C1, MAP4K4, MAPK13, MASP1, MB, MB21D2,
MBD1, MBOAT7, MC4R, MCM10, MDM2, MED1, MED13L, MEDAG, MEF2D, MEGF6,
MEIS2, MEMO1, MEPCE, MFGE8, MFN2, MIAT, MICAL2, MINPP1, MIR612, MKL1,
MKLN1, MKNK2, MLLT4, MLLT10, MLST8, MMAB, MMP10, MMP24, MMS19,
MMS22L, MN1, MOXD1, MPPE1, MPZL1, MRPL3, MRPL45, MRPL55, MRPS28,
MRVI1, MSANTD3, MSC, MSH2, MSH4, MSH6, MSL3, MSMO1, MSRB3, MTAP,
MTERF3, MTERFD1, MTHFD1L, MTMR9, MTRR, MUM1, MVD, MVK, MXRA5,
MYADM, MYCBP2, MYLK, MYO1D, MYO9B, MYOF, NA, NAA35, NAALADL2,
NADK, NAE1, NAGS, NASP, NAV1, NAV2, NCOA1, NCOA3, NCOA4, NCSTN, NDNF,
NELFA, NEO1, NEURL1B, NF2, NFE2L1, NFX1, NGF, NGFR, NHLH1, NID1, NID2,
NIPA1, NKX3-1, NLN, NOL10, NOMO3, NOTCH3, NOTUM, NOVA2, NOX4, NPEPPS,
NRD1, NREP, NRG1, NRROS, NSUN4, NT5C2, NT5E, NTNG1, NUDT4, NUP153,
NUP35, NUP50, NUPL1, NUSAP1, OCLN, ODF2, OLR1, OS9, OSBPL6, OSBPL10,
OSMR, OXCT1, OXCT2, P4HA1, P4HB, PABPC1, PAIP2B, PAK4, PAPD4, PARD3,
PARN, PARP14, PARP4, PARVB, PBLD, PCBP2, PCBP4, PCDHGB3, PCGF3, PCM1,
PCMTD2, PCNXL2, PCSK9, PDE1C, PDE4A, PDE5A, PDE7A, PDGFD, PDGFRB,
PDLIM7, PDS5B, PDXDC1, PEAR1, PEPD, PEX5, PFKP, PHACTR3, PHF19, PHF8,
PHRF1, PHTF2, PI4K2A, PIEZO1, PIGN, PIGU, PIK3C2B, PIK3CD, PIK3R1, PIKFYVE,
PIM2, PITPNA, PITPNB, PITPNM1, PITPNM3, PLAU, PLEC, PLEK2, PLEKHA1,
PLEKHA6, PLEKHB2, PLEKHH2, PLSCR1, PLSCR3, PLXNB2, PLXNC1, PMS1, PNISR,
PODN, POLE3, POLN, POLR1A, POLR3D, POMT2, POSTN, POU2F1, PPAPDC1A,
PPARA, PPARG, PPHLN1, PPIP5K1, PPIP5K2, PPM1E, PPP1R12A, PPP1R26, PPP3CA,
PPP6R1, PPP6R2, PRKACB, PRKCA, PRKDC, PRKG1, PRMT1, PRNP, PRPF31, PRPH2,
PRRG4, PRSS23, PRUNE2, PSMA4, PSMC1, PSMD6, PSMD6-AS2, PTGIS, PTK2B,
PTPN14, PTX3, PUF60, PUS7, PVR, PXK, PXN, QKI, RAB23, RAB2B, RAB30, RAB34,
RAB38, RAB44, RAD1, RAD9B, RAD23B, RAF1, RALB, RAP1A, RAP1GDS1,
RAPGEF1, RARG, RARS, RARS2, RASSF8, RBBP8, RBCK1, RBFOX2, RBKS, RBM10,
RCC1, RDX, RERE, RFTN1, RFWD2, RFX3-AS1, RGCC, RGS10, RGS3, RIF1, RNF14,
RNF19A, RNF38, RNFT1, ROR1, ROR2, RPA1, RPL10, RPS10, RPS6KB2, RPS6KC1,
RRBP1, RWDD4, SAMD4A, SAMD9, SAMD9L, SAR1A, SART3, SCAF4, SCAF8,
SCARNA9, SCD, SCLT1, SCO1, SDCBP, SEC14L1, SEC22A, SEC24A, SEC24B,
SEC61A1, SENP6, SEPT9, SERGEF, SERPINE2, SF1, SGK3, SGOL2, SH3RF1, SH3YL1,
SHROOM3, SIGLEC10, SKA2, SKIL, SLC12A2, SLC24A3, SLC25A17, SLC35F3,
SLC39A3, SLC39A10, SLC4A4, SLC4A11, SLC41A1, SLC44A2, SLC46A2, SLC6A15,
SLC7A6, SLC7A8, SLC7A11, SLC9A3, SLIT3, SMARCA4, SMARCC2, SMC4, SMC6,
SMCHD1, SMG1, SMG1P3, SMN2, SMPD4, SMTN, SMYD3, SMYD5, SNAP23, SNED1,
SNHG16, SNX7, SNX14, SOCS2, SON, SORBS2, SORCS2, SOS2, SOX7, SPATA18,
SPATA20, SPATA5, SPATS2, SPDYA, SPEF2, SPG20, SPIDR, SPRED2, SPRYD7, SQLE,
SQRDL, SQSTM1, SRCAP, SREBF1, SREK1, SRGAP1, SRRM1, SRSF3, STAC2,
STARD4, STAT1, STAT3, STAT4, STAU1, STC2, STEAP2, STK32B, STRIP1, STRN3,
STRN4, STS, STX16, STXBP6, SULF1, SUPT20H, SVEP1, SYNE1, SYNE2, SYNGR2,
SYNPO, SYNPO2, SYNPO2L, SYT15, SYTL2, TACC1, TAF2, TAGLN3, TANC2,
TANGO6, TARBP1, TARS, TASP1, TBC1D15, TBL2, TCF12, TCF4, TCF7L2, TENC1,
TENM2, TEP1, TET3, TEX21P, TFCP2, TGFA, TGFB2, TGFB3, TGFBI, TGFBR1,
TGFBRAP1, TGM2, THADA, THAP4, THBS2, THRB, TIAM1, TIMP2, TJP2, TLE3,
TLK1, TMC3, TMEM102, TMEM119, TMEM134, TMEM154, TMEM189-UBE2V1,
TMEM214, TMEM256-PLSCR3, TMEM47, TMEM50B, TMEM63A, TNC, TNFAIP3,
TNFAIP8L3, TNFRSF12A, TNFRSF14, TNIP1, TNKS1BP1, TNPO3, TNRC18P1,
TNRC6A, TNS1, TNS3, TNXB, TOE1, TOMM40, TOMM5, TOPORS, TP53AIP1,
TP53INP1, TPRG1, TRAF3, TRAK1, TRAPPC12, TRIB1, TRIM2, TRIM23, TRIM26,
TRIM28, TRIM65, TRIM66, TRMT1L, TRPC4, TRPS1, TSC2, TSHZ1, TSHZ2, TSPAN11,
TSPAN18, TSPAN2, TSPAN7, TSSK3, TTC7A, TTC7B, TUBB2C, TUBB3, TUBE1,
TXNIP, TXNL1, TXNRD1, TYW5, U2SURP, UBAP2L, UBE2G2, UBE2V1, UBQLN4,
UCHL5, UHMK1, UHRF1BP1L, UNC5B, URGCP, USP19, USP7, USP27X, UVRAG,
VANGL1, VARS2, VAV2, VCL, VIM-AS1, VIPAS39, VPS13A, VPS29, VPS41, VPS51,
VSTM2L, VWA8, VWF, WDR19, WDR27, WDR37, WDR48, WDR91, WIPF1, WISP1,
WNK1, WNT5B, WNT10B, WSB1, WWTR1, XIAP, XRN2, YAP1, YDJC, YES1, YPEL5,
YTHDF3, Z24749, ZAK, ZBTB10, ZBTB24, ZBTB26, ZBTB7A, ZC3H12C, ZC3H14,
ZC3H18, ZCCHC5, ZCCHC8, ZCCHC11, ZEB1, ZEB2, ZFAND1, ZFAND5, ZFP82, ZHX3,
ZMIZ1, ZMIZ1-AS1, ZMYM2, ZNF12, ZNF138, ZNF148, ZNF212, ZNF219, ZNF227,
ZNF232, ZNF24, ZNF268, ZNF28, ZNF281, ZNF335, ZNF350, ZNF37A, ZNF37BP,
ZNF395, ZNF431, ZNF583, ZNF621, ZNF652, ZNF655, ZNF660, ZNF674, ZNF680,
ZNF74, ZNF764, ZNF778, ZNF780A, ZNF79, ZNF827, ZNF837, ZNF839 or ZNF91

[2058] Table 2 shows certain genes that are expected to demonstrate an effect on inclusion of an iExon with a corresponding change in isoform abundance as a result of iExon generation in RNA having intronic REMS elements in the presence of a compound as described herein. The change in abundance is expected to have a statistically significant p value.

TABLE 2
ABCA1, ABCB7, ABCC1, ABHD10, ABL2, ABLIM3, ACACA, ACADVL, ACAT2,
ADAM12, ADAM15, ADAM17, ADAM33, AFF2, AGK, AGPAT3, AGPS, AHCYL2,
AHDC1, AHRR, AJUBA, AK021888, AK310472, AKAP1, AKAP9, AKNA, ALCAM,
ALDH4A1, AMPD2, ANK2, ANKFY1, ANKHD1-EIF4EBP3, ANKRD17, ANKS6,
ANP32A, ANXA11, ANXA6, AP2B1, APAF1, APLP2, APP, APPL2, APTX, ARHGAP22,
ARID1A, ARID2, ARMCX3, ASAP1, ASL, ASNS, ASPH, ATAD2B, ATF7IP, ATG9A,
ATMIN, ATP2C1, ATXN3, AURKA, AXIN1, B4GALT2, BACE1, BAG2, BASP1,
BC033281, BCAR3, BEND6, BICD1, BIN1, BNC1, BRD2, BRPF1, BSCL2, BTBD10,
BZW1, C11orf30, C11orf73, C17orf76-AS1, C4orf27, C5orf24, C6orf48, C9orf69, CAB39,
CALU, CAMKK1, CAPNS1, CASC3, CASP8AP2, CAV1, CCAR1, CCDC77, CCDC88A,
CCDC92, CCT6A, CD276, CD46, CDC25B, CDC40, CDC42BPA, CDCA7, CDH11,
CDH13, CDK11B, CDK16, CDKAL1, CEP68, CFLAR, CHD8, CIZ1, CLIC1, CLK4,
CNOT1, COG1, COL12A1, COL1A1, COL6A1, COPS7B, CPEB2, CREB5, CRLS1,
CRTAP, CSDE1, CSNK1A1, CTDSP2, CTNND1, CUL2, CUL4A, CUX1, CYB5B,
CYBRD1, CYP51A1, DAB2, DACT1, DARS, DAXX, DCAF10, DCAF11, DCBLD2,
DCUN1D4, DDAH1, DDAH2, DDHD2, DDR1, DDX39B, DDX42, DENND1A,
DENND1B, DENND5A, DGCR2, DGKA, DHCR24, DHCR7, DHFR, DHX9, DIAPH1,
DIAPH3, DIS3L, DKFZp434M1735, DKK3, DLC1, DNM2, DOCK1, DPP8, DSEL, DST,
DSTN, EBF1, EEA1, EEF1A1, EFCAB14, EGR1, EHMT2, EIF2B3, EIF4G1, EIF4G2,
EIF4G3, ELF2, ENG, ENPP2, ENSA, EPN1, EPT1, ERC1, ERGIC3, ETV5, EXO1, EXTL2,
EYA3, FADS1, FADS2, FAF1, FAM111A, FAM198B, FAM219A, FAM219B, FAM3C,
FAM65A, FBXO10, FBXO18, FBXO31, FBXO34, FBXO9, FDFT1, FDPS, FER, FEZ1,
FGD5-AS1, FGFRL1, FHOD3, FLII, FLNB, FN1, FNBP1, FOCAD, FOS, FOSB, FOSL1,
FOXK1, FOXM1, FUS, FYN, GABPB1, GALC, GALNT1, GAS7, GBA2, GCFC2, GGCT,
GHDC, GIGYF2, GJC1, GMIP, GNA13, GNAS, GNL3L, GOLGA2, GOLGA4, GOLGB1,
GORASP1, GPR1, GPR89A, GPSM2, GREM1, GRK6, GSE1, GTF2H2B, HAS2, HAT1,
HAUS3, HAUS6, HDAC7, HEG1, HLA-A, HLA-E, HLTF, HMGA1, HMGB1, HMGCR,
HMGCS1, HMOX1, HNRNPR, HNRNPUL1, HP1BP3, HRH1, HSD17B12, HSD17B4,
HTT, IARS, IDH1, IDI1, IGF2BP2, IL6ST, INHBA, INSIG1, IQCE, ITGAV, ITGB5,
ITM2C, ITSN1, KANSL3, KCNK2, KIAA1033, KIAA1143, KIAA1199, KIAA1522,
KIAA1524, KIAA1549, KIAA1715, KIF14, KIF2A, KIF3A, KLC1, KLC2, KLF6, KLHL7,
KRT18, KRT19, KRT34, KRTAP2-3, LAMA2, LAMB1, LARP4, LARP7, LATS2, LDLR,
LEMD3, LGALS8, LIMS1, LINC00341, LINC00657, LMAN2L, LMO7, LONP1, LOX,
LRCH4, LRIG1, LRP8, LRRC8A, LSS, LTBR, LUC7L2, LZTS2, MADD, MAGED4,
MAGED4B, MAN1A2, MAP4K4, MBD1, MBOAT7, MDM2, MED1, MEDAG, MEF2D,
MEIS2, MEMO1, MEPCE, MFGE8, MICAL2, MINPP1, MKL1, MKLN1, MKNK2,
MLLT4, MLST8, MMAB, MMS19, MMS22L, MPPE1, MPZL1, MRPL3, MSANTD3,
MSC, MSH2, MSH6, MSL3, MSMO1, MSRB3, MTAP, MTERFD1, MTHFD1L, MTMR9,
MTRR, MUM1, MVD, MVK, MYADM, MYLK, MYO1D, MYO9B, MYOF, NAA35,
NADK, NASP, NAV1, NAV2, NCOA1, NCOA3, NCOA4, NCSTN, NELFA, NEO1,
NEURL1B, NF2, NFE2L1, NFX1, NID1, NID2, NIPA1, NKX3-1, NOL10, NOMO3,
NPEPPS, NRD1, NREP, NRG1, NSUN4, NT5C2, NT5E, NTNG1, NUDT4, NUP153,
NUP35, NUP50, NUPL1, NUSAP1, ODF2, OS9, OSBPL6, OSMR, P4HA1, P4HB,
PABPC1, PAK4, PAPD4, PARD3, PARN, PARP14, PARP4, PARVB, PCBP2, PCBP4,
PCDHGB3, PCGF3, PCM1, PCMTD2, PCNXL2, PCSK9, PDE4A, PDE7A, PDLIM7,
PDXDC1, PEPD, PEX5, PFKP, PHF19, PHF8, PHRF1, PHTF2, PI4K2A, PIEZO1, PIGU,
PIK3C2B, PITPNA, PITPNB, PITPNM1, PLAU, PLEC, PLEKHB2, PLSCR3, PLXNB2,
PLXNC1, PMS1, POLE3, POLR3D, POSTN, POU2F1, PPAPDC1A, PPARA, PPHLN1,
PPIP5K1, PPP1R12A, PPP6R1, PPP6R2, PRKACB, PRKDC, PRMT1, PRNP, PRSS23,
PSMA4, PSMC1, PSMD6, PTK2B, PTPN14, PUF60, PUS7, PVR, PXN, QKI, RAB23,
RAB2B, RAB34, RAD1, RAD23B, RALB, RAP1A, RAP1GDS1, RARG, RASSF8,
RBCK1, RBFOX2, RBM10, RCC1, RFTN1, RFWD2, RGS10, RGS3, RIF1, RNF14,
RNF19A, RNF38, RNFT1, RPL10, RPS6KC1, RRBP1, RWDD4, SAMD9, SAMD9L,
SAR1A, SART3, SCAF4, SCAF8, SCD, SCLT1, SCO1, SDCBP, SEC14L1, SEC22A,
SEC24B, SEC61A1, SEPT9, SERPINE2, SF1, SGOL2, SH3RF1, SKIL, SLC25A17,
SLC39A3, SLC41A1, SLC4A4, SLC7A6, SLC7A8, SMARCA4, SMARCC2, SMC4, SMC6,
SMCHD1, SMG1, SMN2, SMPD4, SMYD3, SMYD5, SNAP23, SNHG16, SNX14, SOCS2,
SON, SOS2, SPATA20, SPATS2, SPG20, SPRED2, SQLE, SQRDL, SQSTM1, SRCAP,
SREBF1, SREK1, SRSF3, STARD4, STAT1, STAT3, STAU1, STC2, STEAP2, STRIP1,
STRN3, STX16, SUPT20H, SYNE1, SYNE2, SYT15, SYTL2, TACC1, TAF2, TANC2,
TARBP1, TARS, TBC1D15, TBL2, TCF7L2, TENC1, TENM2, TEP1, TET3, TFCP2,
TGFBI, TGFBR1, TGFBRAP1, THADA, THAP4, THRB, TIMP2, TJP2, TLE3, TLK1,
TMEM154, TMEM47, TMEM63A, TNC, TNFAIP3, TNFRSF12A, TNIP1, TNKS1BP1,
TNPO3, TNS1, TNS3, TOE1, TOMM40, TOMM5, TOPORS, TP53INP1, TRAF3, TRAK1,
TRAPPC12, TRIB1, TRIM2, TRIM23, TRIM26, TRIM28, TRIM65, TRMT1L, TRPS1,
TSC2, TSHZ1, TSPAN2, TTC7A, TUBB2C, TUBB3, TXNL1, TXNRD1, U2SURP,
UBAP2L, UBE2G2, UBE2V1, UBQLN4, UCHL5, UHMK1, UHRF1BP1L, UNC5B,
USP19, USP7, VANGL1, VARS2, VCL, VIPAS39, VPS13A, VPS29, VPS51, VWA8,
WDR19, WDR37, WDR48, WIPF1, WNT5B, WSB1, WWTR1, XIAP, XRN2, YAP1,
YES1, YPEL5, YTHDF3, Z24749, ZAK, ZBTB10, ZBTB24, ZBTB7A, ZC3H12C,
ZC3H14, ZC3H18, ZCCHC11, ZEB1, ZEB2, ZFAND1, ZFAND5, ZHX3, ZMIZ1, ZMYM2,
ZNF12, ZNF148, ZNF219, ZNF227, ZNF24, ZNF268, ZNF28, ZNF281, ZNF335, ZNF37A,
ZNF37BP, ZNF395, ZNF583, ZNF621, ZNF652, ZNF655, ZNF674, ZNF74, ZNF764,
ZNF778, ZNF780A, ZNF827, ZNF839 or ZNF91

[2059] Table 3 shows certain genes that are expected to demonstrate an effect on inclusion of an iExon with a corresponding change in isoform abundance as a result of iExon generation in RNA having intronic REMS elements in the presence of a compound as described herein. The change in abundance is expected to have a statistically significant p value.

TABLE 3
ABCA1, ABCC1, ABL2, ACACA, ACAT2, AFF2, AHRR, AK021888, AK310472,
AKAP1, ANK2, ANKHD1-EIF4EBP3, AP2B1, APAF1, APLP2, ARID1A, ARMCX3,
ASAP1, ASPH, ATAD2B, ATF7IP, ATG9A, AXIN1, BACE1, BIN1, BNC1, BRPF1,
BZW1, C11orf30, C11orf73, C17orf76-AS1, C4orf27, C6orf48, CAB39, CAMKK1,
CCDC88A, CCDC92, CDC25B, CDC42BPA, CDCA7, CDH11, CDH13, CEP68, CFLAR,
COPS7B, CREB5, CUL2, CUL4A, CUX1, CYP51A1, DCUN1D4, DDR1, DDX39B,
DDX42, DENND1A, DENND5A, DGKA, DHCR24, DHCR7, DIAPH1, DIAPH3, DNM2,
DOCK1, EFCAB14, EIF2B3, EPN1, EPT1, ERC1, ETV5, FADS1, FADS2, FAF1,
FAM198B, FAM219B, FBXO10, FBXO9, FDFT1, FDPS, FER, FEZ1, FHOD3, FLII,
FLNB, FNBP1, FOS, FOSB, FOXM1, FYN, GABPB1, GALC, GAS7, GGCT, GJC1,
GPSM2, GRK6, HAS2, HAT1, HLTF, HMGA1, HMGB1, HMGCR, HMGCS1, HMOX1,
HP1BP3, HSD17B12, HTT, IDI1, INHBA, INSIG1, KANSL3, KIAA1199, KIAA1524,
KIAA1715, KIF3A, KLF6, KRT19, KRT34, KRTAP2-3, LAMA2, LARP7, LDLR, LEMD3,
LMAN2L, LRCH4, LRP8, LSS, MAGED4, MAGED4B, MAN1A2, MEDAG, MEF2D,
MEMO1, MFGE8, MICAL2, MMAB, MMS19, MMS22L, MSL3, MSMO1, MTAP,
MTERFD1, MVD, MVK, NASP, NAV2, NEURL1B, NFE2L1, NID1, NPEPPS, NREP,
NRG1, NSUN4, NT5C2, NUP153, P4HA1, PABPC1, PAPD4, PCBP2, PCM1, PCSK9,
PDXDC1, PEPD, PHF19, PHF8, PHTF2, PIK3C2B, PITPNB, PLEC, PMS1, POU2F1,
PPHLN1, PRKDC, PRSS23, PSMC1, PTPN14, PUF60, PVR, RAB23, RAD23B, RAP1A,
RASSF8, RBM10, RCC1, RFWD2, RNFT1, RWDD4, SAMD9L, SART3, SCAF4, SCD,
SEC22A, SEC61A1, SERPINE2, SF1, SLC25A17, SLC7A6, SLC7A8, SMN2, SMYD3,
SMYD5, SNAP23, SNHG16, SQLE, SQRDL, SQSTM1, SRCAP, SREBF1, STARD4,
STAT1, STAU1, STEAP2, STRN3, SYNE1, TACC1, TAF2, TANC2, TARBP1, TBC1D15,
TEP1, TFCP2, TGFBRAP1, THADA, TIMP2, TLK1, TMEM154, TNS3, TOMM5, TRAF3,
TRAK1, TRAPPC12, TRIM2, TRIM26, TRIM65, TSPAN2, U2SURP, UBAP2L, UBE2V1,
UCHL5, UHRF1BPIL, VANGL1, VARS2, VPS13A, VPS29, VWA8, WSB1, XIAP, XRN2,
YPEL5, ZAK, ZC3H18, ZFAND5, ZMIZ1, ZMYM2, ZNF219, ZNF227, ZNF24, ZNF37A,
ZNF37BP, ZNF395, ZNF652, ZNF674, ZNF74 or ZNF778

[2060] Table 4 shows certain genes that are expected to demonstrate an effect on inclusion of an iExon with a corresponding change in isoform abundance as a result of iExon generation in RNA having intronic REMS elements in the presence of a compound as described herein. The change in abundance is expected to have a statistically significant p value.

TABLE 4
ABCC1, ACADVL, ADAM15, AGPAT3, AHRR, AJUBA, AKAP1, AKAP9, ALCAM,
ALDH4A1, ANKFY1, AP2B1, APLP2, APP, ARID1A, ARID2, ASPH, ATMIN, BASP1,
BC033281, BCAR3, C11orf73, C17orf76-AS1, C5orf24, C6orf48, CAB39, CASP8AP2,
CAV1, CCAR1, CCT6A, CD276, CD46, CDC25B, CDK16, CEP68, CHD8, CLIC1,
COL12A1, CPEB2, CREB5, CRLS1, CRTAP, CTNND1, CUX1, CYBRD1, DACT1,
DCAF10, DCAF11, DDHD2, DDX39B, DIAPH3, DKK3, DLC1, DSTN, EBF1, EGR1,
EIF4G1, EIF4G3, ENG, ERC1, ETV5, FAM198B, FAM219A, FAM3C, FEZ1, FGD5-AS1,
FLII, FN1, FNBP1, FOS, FOSB, FOXK1, FOXM1, FYN, GABPB1, GALC, GALNT1,
GBA2, GGCT, GHDC, GMIP, GNA13, GNAS, GNL3L, GOLGA2, GORASP1, GREM1,
GSE1, HAUS6, HDAC7, HEG1, HLA-A, HLA-E, HMGA1, HP1BP3, IL6ST, ITGAV,
KIAA1549, KIF14, KLC1, KLF6, KLHL7, KRT18, LAMA2, LAMB1, LARP7, LATS2,
LGALS8, LIMS1, LINC00341, LONP1, LOX, MDM2, MEPCE, MINPP1, MLLT4, MPPE1,
MRPL3, MSH2, MSH6, MSL3, MTMR9, MTRR, MUM1, MYADM, MYLK, NADK,
NAV2, NCSTN, NFE2L1, NID1, NIPA1, NPEPPS, NRD1, NUDT4, NUSAP1, P4HB,
PABPC1, PAK4, PAPD4, PCNXL2, PDE4A, PDXDC1, PHRF1, PHTF2, PI4K2A,
PIK3C2B, PLAU, PLEKHB2, PLSCR3, PLXNB2, POSTN, POU2F1, PPARA, PPP1R12A,
PRKACB, PSMD6, PTPN14, PUS7, QKI, RAB34, RAD1, RAD23B, RASSF8, RBCK1,
RBFOX2, RFTN1, RNF19A, RNF38, RPS6KC1, RWDD4, SEC14L1, SEC24B, SERPINE2,
SF1, SLC39A3, SLC41A1, SLC4A4, SLC7A6, SMARCA4, SMN2, SNHG16, SNX14,
SON, SPRED2, STAU1, STEAP2, STRIP1, STRN3, TBL2, TGFBI, TGFBR1, THAP4,
TLE3, TMEM47, TNKS1BP1, TOMM40, TOPORS, TRAK1, TRAPPC12, TRIB1, TRIM2,
TRIM23, TRIM65, TRMT1L, TRPS1, TXNL1, TXNRD1, U2SURP, UBE2G2, UBE2V1,
UHMK1, USP7, VPS29, VWA8, WDR19, WDR37, WIPF1, YPEL5, YTHDF3, Z24749,
ZBTB10, ZBTB7A, ZFAND5, ZMIZ1, ZNF12, ZNF148, ZNF335, ZNF395, ZNF583,
ZNF621, ZNF655, ZNF74 or ZNF780A

[2061] Table 5 shows certain genes that are expected to demonstrate an effect on inclusion of an iExon with a corresponding change in isoform abundance as a result of iExon generation in RNA having intronic REMS elements in the presence of a compound as described herein. The change in abundance is expected to have a statistically significant p value.

TABLE 5
ABCB7, ABHD10, ABLIM3, ACACA, ADAM12, ADAM17, ADAM33, AGK, AGPS,
AHCYL2, AHDC1, AHRR, AK021888, AK310472, AKAP1, AKAP9, AKNA, AMPD2,
ANKRD17, ANKS6, ANP32A, ANXA11, ANXA6, APLP2, APP, APPL2, APTX,
ARHGAP22, ARMCX3, ASAP1, ASNS, ASPH, ATG9A, ATP2C1, AURKA, AXIN1,
B4GALT2, BACE1, BASP1, BEND6, BICD1, BIN1, BRD2, BRPF1, BTBD10, C11orf30,
C11orf73, C17orf76-AS1, C4orf27, C6orf48, CAB39, CAPNS1, CASC3, CCDC77,
CCDC88A, CD46, CDC40, CDC42BPA, CDCA7, CDH13, CDK11B, CEP68, CIZ1, CLK4,
CNOT1, COG1, COL12A1, COL1A1, COL6A1, COPS7B, CSDE1, CSNK1A1, CUX1,
CYB5B, CYBRD1, DAB2, DARS, DCBLD2, DCUN1D4, DDAH2, DDR1, DDX39B,
DDX42, DENND1A, DENND1B, DENND5A, DGKA, DHFR, DHX9, DIAPH1, DIAPH3,
DIS3L, DNM2, DOCK1, DPP8, DSEL, EEA1, EFCAB14, EIF2B3, EIF4G1, EIF4G3, ELF2,
ENG, ENPP2, EPN1, EXTL2, EYA3, FAF1, FAM198B, FAM3C, FBXO10, FBXO18,
FBXO31, FBXO9, FER, FEZ1, FHOD3, FLII, FN1, FNBP1, FOCAD, FOSL1, FOXM1,
GABPB1, GALC, GALNT1, GCFC2, GGCT, GIGYF2, GMIP, GNAS, GNL3L, GOLGB1,
GPR89A, GPSM2, GREM1, GRK6, GTF2H2B, HAT1, HAUS3, HEG1, HLA-A, HLTF,
HP1BP3, HRH1, HSD17B12, HSD17B4, HTT, IARS, IDH1, IGF2BP2, ITM2C, KCNK2,
KIAA1033, KIAA1143, KIAA1522, KIAA1524, KIAA1715, KIF3A, KLHL7, LAMA2,
LARP4, LARP7, LATS2, LIMS1, LINC00341, LINC00657, LMAN2L, LMO7, LRCH4,
LRIG1, LRRC8A, LTBR, LUC7L2, LZTS2, MADD, MAGED4B, MAN1A2, MAP4K4,
MED1, MEDAG, MEF2D, MEIS2, MEMO1, MICAL2, MKLN1, MLLT4, MMS19,
MPZL1, MSANTD3, MSC, MSL3, MTAP, MTERFD1, MTHFD1L, MYADM, MYLK,
MYO9B, MYOF, NASP, NAV2, NCOA3, NCOA4, NELFA, NEO1, NEURL1B, NF2,
NID2, NOL10, NPEPPS, NRG1, NSUN4, NT5C2, NT5E, NTNG1, NUP153, NUP35,
NUP50, NUSAP1, ODF2, OS9, OSBPL6, P4HA1, P4HB, PABPC1, PAPD4, PARN,
PARP4, PCBP2, PCBP4, PCDHGB3, PCGF3, PCM1, PCMTD2, PDE7A, PDXDC1, PEPD,
PFKP, PHF19, PHRF1, PHTF2, PIEZO1, PIGU, PITPNA, PITPNB, PITPNM1, PLAU,
PLSCR3, PLXNC1, PMS1, POU2F1, PPAPDC1A, PPHLN1, PPIP5K1, PPP1R12A,
PRKDC, PRMT1, PRSS23, PSMA4, PTK2B, PUF60, PVR, RAB23, RAB2B, RAD1,
RAD23B, RAP1A, RAP1GDS1, RARG, RASSF8, RBCK1, RCC1, RFWD2, RGS3, RNF14,
RNFT1, RPL10, RRBP1, RWDD4, SAR1A, SCAF4, SCAF8, SCLT1, SCO1, SDCBP,
SEC22A, SEPT9, SF1, SGOL2, SLC25A17, SLC4A4, SLC7A6, SMARCC2, SMC4, SMC6,
SMCHD1, SMN2, SMPD4, SMYD3, SNAP23, SNHG16, SOCS2, SOS2, SPATA20,
SPATS2, SPG20, SQRDL, SREBF1, SREK1, SRSF3, STAT1, STAU1, STEAP2, STRN3,
STX16, SUPT20H, SYNE1, SYNE2, SYT15, SYTL2, TAF2, TARBP1, TARS, TBL2,
TCF7L2, TENC1, TENM2, TEP1, TET3, TGFBR1, THADA, THRB, TJP2, TLE3,
TMEM47, TMEM63A, TNFAIP3, TNIP1, TNPO3, TNS1, TNS3, TOE1, TOMM5,
TP53INP1, TRAF3, TRAPPC12, TRIM2, TRIM23, TRIM65, TSC2, TSPAN2, TUBB2C,
TXNRD1, UBAP2L, UBE2V1, UCHL5, USP19, VANGL1, VIPAS39, VPS29, VPS51,
VWA8, WDR48, WNT5B, WSB1, WWTR1, XRN2, YAP1, YES1, YPEL5, YTHDF3,
Z24749, ZBTB24, ZC3H14, ZFAND1, ZFAND5, ZHX3, ZMIZ1, ZMYM2, ZNF219,
ZNF268, ZNF395, ZNF827 or ZNF91

[2062] Table 6 shows certain genes that are expected to demonstrate an effect on inclusion of an iExon with a corresponding change in isoform abundance as a result of iExon generation in RNA having intronic REMS elements in the presence of a compound as described herein. The change in abundance is expected to have a statistically significant p value.

TABLE 6
ACACA, ACADVL, AFF2, AHCYL2, AHRR, AKAP1, ALDH4A1, ANKRD17, AP2B1,
APLP2, ASL, ASPH, ATG9A, ATMIN, ATXN3, BAG2, BASP1, BRPF1, BSCL2,
C11orf30, C11orf73, C17orf76-AS1, C6orf48, C9orf69, CAB39, CALU, CDC25B,
CDC42BPA, CDKAL1, CLIC1, COL12A1, COL1A1, COL6A1, CSNK1A1, CTDSP2,
CUL2, CUL4A, DAXX, DCAF10, DDAH1, DDR1, DDX39B, DENND1A, DGCR2,
DKFZp434M1735, DKK3, DNM2, DST, EEF1A1, EFCAB14, EHMT2, EIF4G1, EIF4G2,
EIF4G3, ENSA, EXO1, FAM111A, FAM198B, FAM65A, FBXO34, FEZ1, FGD5-AS1,
FGFRL1, FLII, FN1, FOXK1, FOXM1, FUS, GALC, GALNT1, GAS7, GCFC2, GGCT,
GJC1, GNA13, GNL3L, GOLGA4, GPR1, GREM1, HEG1, HLA-A, HLA-E, HLTF,
HNRNPR, HNRNPUL1, IQCE, ITGB5, ITSN1, KIAA1033, KIF2A, KIF3A, KLC2, LATS2,
LIMS1, LINC00341, LINC00657, LONP1, LOX, LUC7L2, MBD1, MBOAT7, MEF2D,
MEIS2, MICAL2, MKL1, MKNK2, MLST8, MPPE1, MSL3, MSRB3, MTRR, MYADM,
MYLK, MYO1D, NAA35, NAV1, NAV2, NCOA1, NFX1, NKX3-1, NOMO3, NRG1,
NUDT4, NUPL1, NUSAP1, OSMR, P4HA1, P4HB, PAPD4, PARD3, PARN, PARP14,
PARVB, PCBP2, PCBP4, PCGF3, PDLIM7, PDXDC1, PEX5, PFKP, PHRF1, PI4K2A,
POLE3, POLR3D, POSTN, PPARA, PPP6R1, PPP6R2, PRNP, PXN, RAB34, RAD23B,
RALB, RAP1A, RASSF8, RBCK1, RBFOX2, RGS10, RIF1, RNF14, RNF19A, SAMD9,
SCAF4, SDCBP, SERPINE2, SF1, SH3RF1, SKIL, SLC25A17, SLC4A4, SMG1, SMN2,
SNHG16, SREBF1, STAT3, STC2, STEAP2, STRN3, SYNE1, SYNE2, TACC1, TARS,
TGFBI, TMEM47, TNC, TNFRSF12A, TNS1, TRAF3, TRIM28, TSC2, TSHZ1, TTC7A,
TUBB2C, TUBB3, TXNL1, TXNRD1, UBE2G2, UBE2V1, UBQLN4, UNC5B, USP19,
VARS2, VCL, VPS29, WDR37, WIPF1, WWTR1, ZC3H12C, ZCCHC11, ZEB1, ZEB2,
ZFAND1, ZFAND5, ZMIZ1, ZNF28, ZNF281, ZNF655, ZNF764 or ZNF839

[2063] Table 7 shows genes that demonstrate an effect on change in isoform abundance as a result of having intronic REMS elements in the presence of Compound 774 (at doses ranging from 0.3 μM to 3 μM), having statistically significant adjusted Fisher's Exact Test p value.

TABLE 7
ABCB8, ABCC3, ADAM17, ADCY3, AGPAT4, ANKRA2, ANXA11, APIP, APLP2,
APPL2, ARHGAP1, ARL15, ASAP1, ASPH, ATAD2B, ATXN1, AXIN1, BECN1,
BHMT2, BICD1, BTN3A1, C11orf30, C11orf73, C12orf4, C14orf132, C8orf44, C8orf44-
SGK3, C8orf88, CASC3, CASP7, CCDC122, CDH13, CECR7, CENPI, CEP112, CEP192,
CHEK1, CMAHP, CNRIP1, COPS7B, CPSF4, CRISPLD2, CRYBG3, CSNK1E,
CSNK1G1, DAGLB, DCAF17, DCUN1D4, DDX42, DENND1A, DENND5A, DGKA,
DHFR, DIAPH3, DLGAP4, DNAJC13, DNMBP, DOCK1, DYRK1A, EIF2B3, ENAH,
ENOX1, EP300, ERC1, ERCC1, ERGIC3, ERLIN2, ERRFI1, EVC, FAF1, FAIM,
FAM126A, FAM13A, FAM162A, FAM174A, FAM198B, FBN2, FER, FHOD3, FOCAD,
GALC, GCFC2, GGACT, GGCT, GLCE, GOLGA4, GOLGB1, GPSM2, GULP1, GXYLT1,
HAT1, HDX, HLTF, HMGA2, HNMT, HPS1, HSD17B12, HSD17B4, HTT, IFT57,
INPP5K, IVD, KDM6A, KIAA1524, KIAA1715, LETM2, LOC400927, LRRC42, LUC7L3,
LYRM1, MADD, MB21D2, MCM10, MED13L, MEDAG, MEMO1, MFN2, MMS19,
MRPL45, MRPS28, MTERF3, MYCBP2, MYLK, MYOF, NGF, NREP, NSUN4, NT5C2,
OSMR, OXCT1, PAPD4, PCM1, PDE7A, PDS5B, PDXDC1, PIGN, PIK3CD, PIK3R1,
PIKFYVE, PITPNB, PLEKHA1, PLSCR1, PMS1, POMT2, PPARG, PPHLN1, PPIP5K2,
PPP1R26, PRPF31, PRSS23, PRUNE2, PSMA4, PXK, RAF1, RAP1A, RAPGEF1, RARS2,
RBKS, RERE, RFWD2, RNFT1, RPA1, RPS10, RPS6KB2, SAMD4A, SAR1A, SCO1,
SEC24A, SENP6, SERGEF, SGK3, SH3YL1, SKA2, SLC12A2, SLC25A17, SLC44A2,
SMYD3, SNAP23, SNHG16, SNX7, SOS2, SPATA18, SPATA5, SPIDR, SPRYD7,
SRGAP1, SRRM1, STAT1, STRN3, STXBP6, SUPT20H, TAF2, TASP1, TBC1D15,
TCF12, TCF4, TIAM1, TJP2, TMC3, TMEM189-UBE2V1, TMEM214, TNRC6A, TNS3,
TOE1, TRAF3, TRIM65, TSPAN2, TTC7B, TUBE1, TYW5, UBAP2L, UBE2V1, URGCP,
VAV2, VPS29, WDR27, WDR37, WDR91, WNK1, XRN2, ZCCHC8, ZFP82, ZNF138,
ZNF232, ZNF37BP or ZNF680

[2064] Table 7a shows genes that demonstrate an effect on inclusion of an iExon with a corresponding change in isoform abundance as a result of having intronic REMS elements in the presence of Compound 774 (at doses ranging from 0.3 μM to 3 μM), having statistically significant adjusted Fisher's Exact Test p value.

TABLE 7a
ABCB8, ABCC3, ADAM17, ADCY3, AGPAT4, ANKRA2, ANXA11, APIP, APPL2,
ARHGAP1, ARL15, ASAP1, ASPH, ATAD2B, ATXN1, BECN1, BHMT2, BICD1,
BTN3A1, C11orf30, C11orf73, C12orf4, C14orf132, C8orf44, C8orf44-SGK3, C8orf88,
CASC3, CASP7, CCDC122, CDH13, CECR7, CENPI, CEP112, CEP192, CHEK1,
CMAHP, CNRIP1, COPS7B, CPSF4, CRISPLD2, CRYBG3, CSNK1E, CSNK1G1,
DCAF17, DCUN1D4, DDX42, DENND1A, DENND5A, DGKA, DHFR, DIAPH3,
DNAJC13, DNMBP, DOCK1, DYRK1A, EIF2B3, ENAH, ENOX1, EP300, ERC1,
ERLIN2, ERRFI1, EVC, FAF1, FAIM, FAM126A, FAM13A, FAM162A, FAM174A,
FBN2, FER, FHOD3, FOCAD, GALC, GCFC2, GGACT, GLCE, GOLGA4, GOLGB1,
GPSM2, GULP1, GXYLT1, HDX, HLTF, HMGA2, HNMT, HSD17B12, HSD17B4, HTT,
IFT57, IVD, KDM6A, KIAA1524, KIAA1715, LETM2, LOC400927, LRRC42, LUC7L3,
LYRM1, MB21D2, MCM10, MED13L, MEDAG, MEMO1, MFN2, MMS19, MRPL45,
MRPS28, MTERF3, MYCBP2, MYLK, MYOF, NGF, NREP, NSUN4, NT5C2, OSMR,
OXCT1, PAPD4, PCM1, PDE7A, PDS5B, PDXDC1, PIGN, PIK3CD, PIK3R1, PIKFYVE,
PITPNB, PLEKHA1, PLSCR1, PMS1, POMT2, PPARG, PPIP5K2, PPP1R26, PRPF31,
PRSS23, PSMA4, PXK, RAF1, RAPGEF1, RARS2, RBKS, RERE, RFWD2, RPA1, RPS10,
SAMD4A, SAR1A, SCO1, SEC24A, SENP6, SERGEF, SGK3, SLC12A2, SLC25A17,
SLC44A2, SMYD3, SNAP23, SNHG16, SNX7, SOS2, SPATA5, SPIDR, SPRYD7,
SRGAP1, SRRM1, STAT1, STXBP6, SUPT20H, TAF2, TASP1, TBC1D15, TCF12, TCF4,
TIAM1, TJP2, TMC3, TMEM214, TNRC6A, TNS3, TOE1, TRAF3, TSPAN2, TTC7B,
TYW5, UBAP2L, URGCP, VAV2, WDR27, WDR37, WDR91, WNK1, XRN2, ZCCHC8,
ZFP82, ZNF138, ZNF232 or ZNF37BP

[2065] Table 7b shows genes that demonstrate an effect on inclusion of an exon with a corresponding change in isoform abundance as a result of having iREMS elements in the presence of Compound 774 (at doses ranging from 0.3 μM to 3 μM), having statistically significant adjusted Fisher's Exact Test value.

TABLE 7b
APLP2, AXIN1, CECR7, DAGLB, DLGAP4, ERCC1, ERGIC3, FAM198B, GGCT, HAT1,
HPS1, INPP5K, MADD, PPHLN1, PRUNE2, RAP1A, RNFT1, RPS6KB2, SH3YL1, SKA2,
SPATA18, STRN3, TMEM189-UBE2V1, TRIM65, TUBE1, UBE2V1, VPS29 or ZNF680

Methods of Preventing and/or Treating Diseases

[2066] In another aspect, provided herein are methods for preventing and/or treating a disease associated with the aberrant expression of a product of a gene (e.g., an mRNA transcript or protein), wherein the precursor RNA transcript transcribed from the gene comprises an intronic REMS, the methods comprising administering to a human or non-human subject a compound of Formula (I) or a form thereof, or a pharmaceutical composition comprising a compound of Formula (I) or a form thereof and a pharmaceutically acceptable carrier, excipient or diluent. In a specific embodiment, the gene comprises one or more introns, wherein at least one intron comprises in 5′ to 3′ order: a branch point, a 3′ splice site and an intronic REMS.

[2067] In certain embodiments, the gene is any one of the genes disclosed in Tables 2-7 or 1. In certain embodiments, the gene contains a nucleotide sequence encoding a non-endogenous intronic REMS. In certain embodiments, the gene contains a nucleotide sequence encoding an endogenous intronic REMS. In one embodiment, provided herein are methods for preventing and/or treating a disease associated with aberrant expression of a product of a gene (e.g., an mRNA, RNA transcript or protein), by way of nonlimiting example, disclosed in Table 1, supra, the methods comprising administering to a human or non-human subject a compound of Formula (I) or a form thereof, or a pharmaceutical composition comprising a compound of Formula (I) or a form thereof and a pharmaceutically acceptable carrier, excipient or diluent. In a specific embodiment, the gene comprises one or more introns, wherein at least one of the introns comprises in 5′ to 3′ order: a branch point, a 3′ splice site and an intronic REMS.

[2068] In another embodiment, provided herein are methods for preventing and/or treating a disease associated with aberrant expression of a product of a gene (e.g., an mRNA, RNA transcript or protein), disclosed in Tables 2-7, supra, wherein the precursor RNA transcript transcribed from the gene comprises an intronic REMS, the methods comprising administering to a human or non-human subject a compound of Formula (I) or a form thereof, or a pharmaceutical composition comprising a compound of Formula (I) or a form thereof and a pharmaceutically acceptable carrier, excipient or diluent. In a specific embodiment, the gene comprises one or more introns, wherein at least one intron comprises in 5′ to 3′ order: a branch point, a 3′ splice site and an intronic REMS.

[2069] In another embodiment, provided herein are methods for preventing and/or treating a disease associated with aberrant expression of a product of a gene (e.g., an mRNA, RNA transcript or protein), by way of nonlimiting example, disclosed in International Patent Application No. PCT/US2014/071252 (International Publication No. WO 2015/105657), wherein the precursor RNA transcript transcribed from the gene comprises an intronic REMS, the methods comprising administering to a human or non-human subject a compound of Formula (I) or a form thereof, or a pharmaceutical composition comprising a compound of Formula (I) or a form thereof and a pharmaceutically acceptable carrier, excipient or diluent. In another embodiment, provided herein are methods for preventing and/or treating a disease associated with aberrant expression of a product of a gene (e.g., an mRNA, RNA transcript or protein), by way of nonlimiting example, disclosed in International Patent Application No. PCT/US2016/034864 (International Publication No. WO 2016/196386), wherein the precursor RNA transcript transcribed from the gene comprises an intronic REMS, the methods comprising administering to a human or non-human subject a compound of Formula (I) or a form thereof, or a pharmaceutical composition comprising a compound of Formula (I) or a form thereof and a pharmaceutically acceptable carrier, excipient or diluent. In another embodiment, provided herein are methods for preventing and/or treating a disease associated with aberrant expression of a product of a gene (e.g., an mRNA, RNA transcript or protein), by way of nonlimiting example, not disclosed in either International Publication No. WO 2015/105657, International Publication No. WO 2016/196386, or both, wherein the precursor RNA transcript transcribed from the gene comprises an intronic REMS, the methods comprising administering to a human or non-human subject a compound of Formula (I) or a form thereof, or a pharmaceutical composition comprising a compound of Formula (I) or a form thereof and a pharmaceutically acceptable carrier, excipient or diluent. In a specific embodiment, the gene comprises one or more introns, wherein at least one intron comprises in 5′ to 3′ order: a branch point, a 3′ splice site and an intronic REMS.

[2070] In another embodiment, provided herein are methods for preventing and/or treating a disease associated with aberrant expression of a product of a gene (e.g., an mRNA, RNA transcript or protein), disclosed in Table 1, supra, wherein the precursor RNA transcript transcribed from the gene comprises an intronic REMS, the methods comprising administering to a human or non-human subject a compound of Formula (I) or a form thereof, or a pharmaceutical composition comprising a compound of Formula (I) or a form thereof and a pharmaceutically acceptable carrier, excipient or diluent. In a specific embodiment, the gene comprises one or more introns, wherein at least one intron comprises in 5′ to 3′ order: a branch point, a 3′ splice site and an intronic REMS.

[2071] In another embodiment, provided herein are methods for preventing and/or treating a disease associated with aberrant expression of a product of a gene, disclosed in Table 7, supra, (e.g., an mRNA, RNA transcript or protein), comprising administering to a human or non-human subject a compound of Formula (I) or a form thereof, or a pharmaceutical composition comprising a compound of Formula (I) or a form thereof and a pharmaceutically acceptable carrier, excipient or diluent. See the example section for additional information regarding the genes in Table 7. In a specific embodiment, the gene comprises one or more introns, wherein at least one intron comprises in 5′ to 3′ order: a branch point, a 3′ splice site and an intronic REMS.

[2072] In another aspect, provided herein are methods for preventing and/or treating a disease in which a change in the level of expression of one, two, three or more RNA isoforms encoded by a gene is beneficial to the prevention and/or treatment of the disease, wherein the precursor RNA transcript transcribed from the gene comprises an intronic REMS, the methods comprising administering to a human or non-human subject a compound of Formula (I) or a form thereof, or a pharmaceutical composition comprising a compound of Formula (I) or a form thereof and a pharmaceutically acceptable carrier, excipient or diluent. In a specific embodiment, the gene comprises one or more introns, wherein at least one intron comprises in 5′ to 3′ order: a branch point, a 3′ splice site and an intronic REMS.

[2073] In certain embodiments, the gene is any one of the genes disclosed in Tables 2-7 or 1. In certain embodiments, the gene contains a nucleotide sequence encoding ae non-endogenous intronic REMS. In certain embodiments, the gene contains a nucleotide sequence encoding an endogenous intronic REMS. In one embodiment, provided herein are methods for preventing and/or treating a disease in which the alteration (e.g., increase or decrease) in the expression one, two, three or more RNA isoforms encoded by a gene, by way of nonlimiting example, disclosed in Table 1, supra, is beneficial to the prevention and/or treatment of the disease, the methods comprising administering to a human or non-human subject a compound of Formula (I) or a form thereof, or a pharmaceutical composition comprising a compound of Formula (I) or a form thereof and a pharmaceutically acceptable carrier, excipient or diluent. In a specific embodiment, the gene comprises one or more introns, wherein at least one intron comprises in 5′ to 3′ order: a branch point, a 3′ splice site and an intronic REMS.

[2074] In another embodiment, provided herein are methods for preventing and/or treating a disease in which the alteration (e.g., increase or decrease) in the expression one, two, three or more RNA isoforms encoded by a gene, disclosed in Tables 2-7, supra, is beneficial to the prevention and/or treatment of the disease, wherein the precursor RNA transcript transcribed from the gene comprises an intronic REMS, the methods comprising administering to a human or non-human subject a compound of Formula (I) or a form thereof, or a pharmaceutical composition comprising a compound of Formula (I) or a form thereof and a pharmaceutically acceptable carrier, excipient or diluent. In another embodiment, provided herein are methods for preventing and/or treating a disease in which the alteration (e.g., increase or decrease) in the expression one, two, three or more RNA isoforms encoded by a gene, disclosed in International Patent Application No. PCT/US2014/071252 (International Publication No. WO 2015/105657), is beneficial to the prevention and/or treatment of the disease, wherein the precursor RNA transcript transcribed from the gene comprises an intronic REMS, the methods comprising administering to a human or non-human subject a compound of Formula (I) or a form thereof, or a pharmaceutical composition comprising a compound of Formula (I) or a form thereof and a pharmaceutically acceptable carrier, excipient or diluent. In another embodiment, provided herein are methods for preventing and/or treating a disease in which the alteration (e.g., increase or decrease) in the expression one, two, three or more RNA isoforms encoded by a gene, disclosed in International Patent Application No. PCT/US2016/034864 (International Publication No. WO 2016/196386), is beneficial to the prevention and/or treatment of the disease, wherein the precursor RNA transcript transcribed from the gene comprises an intronic REMS, the methods comprising administering to a human or non-human subject a compound of Formula (I) or a form thereof, or a pharmaceutical composition comprising a compound of Formula (I) or a form thereof and a pharmaceutically acceptable carrier, excipient or diluent. In another embodiment, provided herein are methods for preventing and/or treating a disease in which the alteration (e.g., increase or decrease) in the expression one, two, three or more RNA isoforms encoded by a gene, not disclosed in either International Publication No. WO 2015/105657, International Publication No. WO 2016/196386, or both, is beneficial to the prevention and/or treatment of the disease, wherein the precursor RNA transcript transcribed from the gene comprises an intronic REMS, the methods comprising administering to a human or non-human subject a compound of Formula (I) or a form thereof, or a pharmaceutical composition comprising a compound of Formula (I) or a form thereof and a pharmaceutically acceptable carrier, excipient or diluent. In a specific embodiment, the gene comprises one or more introns, wherein at least one intron comprises in 5′ to 3′ order: a branch point, a 3′ splice site and an intronic REMS.

[2075] In another embodiment, provided herein are methods for preventing and/or treating a disease in which the alteration (e.g., increase or decrease) in the expression one, two, three or more RNA isoforms encoded by a gene, disclosed in Table 1, supra, is beneficial to the prevention and/or treatment of the disease, wherein the precursor RNA transcript transcribed from the gene comprises an intronic REMS, the methods comprising administering to a human or non-human subject a compound of Formula (I) or a form thereof, or a pharmaceutical composition comprising a compound of Formula (I) or a form thereof and a pharmaceutically acceptable carrier, excipient or diluent. In a specific embodiment, the gene comprises one or more introns, wherein at least one intron comprises in 5′ to 3′ order: a branch point, a 3′ splice site and an intronic REMS.

[2076] In another embodiment, provided herein are methods for preventing and/or treating a disease in which the alteration (e.g., increase or decrease) in the expression one, two, three or more RNA isoforms encoded by a gene, disclosed in Table 1, supra, is beneficial to the prevention and/or treatment of the disease, the methods comprising administering to a human or non-human subject a compound of Formula (I) or a form thereof, or a pharmaceutical composition comprising a compound of Formula (I) or a form thereof and a pharmaceutically acceptable carrier, excipient or diluent. In a specific embodiment, one, two, three or more RNA isoforms encoded by a gene, disclosed in Table 7, supra, are decreased following administration of a compound of Formula (I) or a form thereof and a pharmaceutically acceptable carrier, excipient or diluent. See the example section for additional information regarding the genes in Table 7. In a specific embodiment, the gene comprises one or more introns, wherein at least one intron comprises in 5′ to 3′ order: a branch point, a 3′ splice site and an intronic REMS.

[2077] In another aspect, provided herein are methods for preventing and/or treating a disease in which a change in the level of expression of one, two, three or more protein isoforms encoded by a gene is beneficial to the prevention and/or treatment of the disease, wherein the precursor RNA transcript transcribed from the gene comprises an intronic REMS, the methods comprising administering to a human or non-human subject a compound of Formula (I) or a form thereof, or a pharmaceutical composition comprising a compound of Formula (I) or a form thereof and a pharmaceutically acceptable carrier, excipient or diluent. In a specific embodiment, the gene comprises one or more introns, wherein at least one intron comprises in 5′ to 3′ order: a branch point, a 3′ splice site and an intronic REMS.

[2078] In certain embodiments, the gene is any one of the genes disclosed in Tables 2-7 or 1. In certain embodiments, the gene contains a nucleotide sequence encoding a non-endogenous intronic REMS. In certain embodiments, the gene contains a nucleotide sequence encoding an endogenous intronic REMS. In one embodiment, provided herein are methods for preventing and/or treating a disease in which the alteration (e.g., increase or decrease) in the expression one, two, three or more protein isoforms encoded by a gene, by way of nonlimiting example, disclosed in Table 1, supra, is beneficial to the prevention and/or treatment of the disease, the methods comprising administering to a human or non-human subject a compound of Formula (I) or a form thereof, or a pharmaceutical composition comprising a compound of Formula (I) or a form thereof and a pharmaceutically acceptable carrier, excipient or diluent. In a specific embodiment, the gene comprises one or more introns, wherein at least one intron comprises in 5′ to 3′ order: a branch point, a 3′ splice site and an intronic REMS.

[2079] In another embodiment, provided herein are methods for preventing and/or treating a disease in which the alteration (e.g., increase or decrease) in the expression one, two, three or more protein isoforms encoded by a gene, disclosed in Tables 2-7, supra, is beneficial to the prevention and/or treatment of the disease, wherein the precursor RNA transcript transcribed from the gene comprises an intronic REMS, the methods comprising administering to a human or non-human subject a compound of Formula (I) or a form thereof, or a pharmaceutical composition comprising a compound of Formula (I) or a form thereof and a pharmaceutically acceptable carrier, excipient or diluent. In a specific embodiment, the gene comprises one or more introns, wherein at least one intron comprises in 5′ to 3′ order: a branch point, a 3′ splice site and an intronic REMS.

[2080] In another embodiment, provided herein are methods for preventing and/or treating a disease in which the alteration (e.g., increase or decrease) in the expression one, two, three or more protein isoforms encoded by a gene, disclosed in International Patent Application No. PCT/US2014/071252 (International Publication No. WO 2015/105657), is beneficial to the prevention and/or treatment of the disease, wherein the precursor RNA transcript transcribed from the gene comprises an intronic REMS, the methods comprising administering to a human or non-human subject a compound of Formula (I) or a form thereof, or a pharmaceutical composition comprising a compound of Formula (I) or a form thereof and a pharmaceutically acceptable carrier, excipient or diluent. In another embodiment, provided herein are methods for preventing and/or treating a disease in which the alteration (e.g., increase or decrease) in the expression one, two, three or more protein isoforms encoded by a gene, disclosed in International Patent Application No. PCT/US2016/034864 (International Publication No. WO 2016/196386), is beneficial to the prevention and/or treatment of the disease, wherein the precursor RNA transcript transcribed from the gene comprises an intronic REMS, the methods comprising administering to a human or non-human subject a compound of Formula (I) or a form thereof, or a pharmaceutical composition comprising a compound of Formula (I) or a form thereof and a pharmaceutically acceptable carrier, excipient or diluent. In a specific embodiment, the gene comprises one or more introns, wherein at least one intron comprises in 5′ to 3′ order: a branch point, a 3′ splice site and an intronic REMS.

[2081] In another embodiment, provided herein are methods for preventing and/or treating a disease in which the alteration (e.g., increase or decrease) in the expression one, two, three or more protein isoforms encoded by a gene, disclosed in Table 1, supra, is beneficial to the prevention and/or treatment of the disease, wherein the precursor RNA transcript transcribed from the gene comprises an intronic REMS, the methods comprising administering to a human or non-human subject a compound of Formula (I) or a form thereof, or a pharmaceutical composition comprising a compound of Formula (I) or a form thereof and a pharmaceutically acceptable carrier, excipient or diluent. In a specific embodiment, the gene comprises one or more introns, wherein at least one intron comprises in 5′ to 3′ order: a branch point, a 3′ splice site and an intronic REMS.

[2082] In another embodiment, provided herein are methods for preventing and/or treating a disease in which the alteration (e.g., increase or decrease) in the expression one, two, three or more protein isoforms encoded by a gene, disclosed in Table 1, supra, is beneficial to the prevention and/or treatment of the disease, the methods comprising administering to a human or non-human subject a compound of Formula (I) or a form thereof, or a pharmaceutical composition comprising a compound of Formula (I) or a form thereof and a pharmaceutically acceptable carrier, excipient or diluent. In a specific embodiment, one, two, three or more RNA isoforms encoded by a gene, disclosed in Table 7, supra, are decreased following administration of a compound of Formula (I) or a form thereof and a pharmaceutically acceptable carrier, excipient or diluent. See the example section for additional information regarding the genes in Table 7. In a specific embodiment, the gene comprises one or more introns, wherein at least one intron comprises in 5′ to 3′ order: a branch point, a 3′ splice site and an intronic REMS.

[2083] In another embodiment, provided herein is a method for either preventing, treating or preventing and treating a disease in a subject in which the alteration (e.g., increase or decrease) in the expression one, two, three or more protein isoforms encoded by a gene is beneficial to the prevention and/or treatment of the disease, wherein the gene comprises a DNA nucleotide sequence encoding two exons and an intron, wherein the nucleotide sequence encoding one exon is upstream of the nucleotide sequence encoding the intron and the nucleotide sequence encoding the other exon is downstream of the nucleotide sequence encoding the intron, wherein the DNA nucleotide sequence encoding the intron comprises in 5′ to 3′ order: a nucleotide sequence encoding a first 5′ splice site, a nucleotide sequence encoding a first branch point, a nucleotide sequence encoding a first 3′ splice site, an IREMS, a nucleotide sequence encoding a second branch point and a nucleotide sequence encoding a second 3′ splice site, wherein the iREMS comprises a DNA sequence GAgtrngn (SEQ ID NO: 4), and wherein r is adenine or guanine and n is any nucleotide, the method comprising administering a compound described herein (for example, a compound of Formula (I) or a form thereof) to the subject.

[2084] In another embodiment, provided herein is a method for either preventing, treating and preventing and treating a disease in a subject in which the alteration (e.g., increase or decrease) in the expression one, two, three or more protein isoforms encoded by a gene is beneficial to the prevention and/or treatment of the disease, wherein the gene comprises a DNA nucleotide sequence encoding two exons and an intron, wherein the nucleotide sequence encoding one exon is upstream of the nucleotide sequence encoding the intron and the nucleotide sequence encoding the other exon is downstream of the nucleotide sequence encoding the intron, wherein the DNA nucleotide sequence of the intron comprises in 5′ to 3′ order: an iREMS, a nucleotide sequence encoding a first branch point and a nucleotide sequence encoding a first 3′ splice site, wherein the IREMS comprises a DNA sequence GAgtrngn (SEQ ID NO: 4), and wherein r is adenine or guanine and n is any nucleotide, the method comprising administering a compound described herein (for example, a compound of Formula (I) or a form thereof) to the subject.

[2085] In another embodiment, provided herein is a method for either preventing, treating and preventing and treating a disease in a subject in which the alteration (e.g., increase or decrease) in the expression one, two, three or more protein isoforms encoded by a gene is beneficial to the prevention and/or treatment of the disease, wherein the gene comprises a DNA nucleotide sequence encoding two exons and an intron, and wherein the DNA nucleotide sequence comprises exonic and intronic elements illustrated in FIG. 1A, the method comprising administering a compound described herein (for example, a compound of Formula (I) or a form thereof) to the subject.

[2086] In another embodiment, provided herein is a method for either preventing, treating or preventing and treating a disease in a subject in which the alteration (e.g., increase or decrease) in the expression one, two, three or more protein isoforms encoded by a gene is beneficial to the prevention and/or treatment of the disease, wherein the gene comprises a DNA nucleotide sequence encoding two exons and an intron, and wherein the DNA nucleotide sequence comprises exonic and intronic elements illustrated in FIG. 1B, the method comprising administering a compound described herein (for example, a compound of Formula (I) or a form thereof) to the subject.

[2087] In another embodiment, provided herein is a method for either preventing, treating or preventing and treating a disease in a subject in which the alteration (e.g., increase or decrease) in the expression one, two, three or more protein isoforms encoded by a gene is beneficial to the prevention and/or treatment of the disease, wherein the gene comprises a DNA nucleotide sequence encoding two exons and an intron and wherein the DNA nucleotide sequence comprises exonic and intronic elements illustrated in FIG. 1C, the method comprising administering a compound described herein (for example, a compound of Formula (I) or a form thereof) to the subject.

[2088] In a specific embodiment, the gene is a gene described in a table in this disclosure.

[2089] In some embodiments, the compound of Formula (I) or a form thereof that is administered to a subject is a compound of Formula (11), Formula (111), Formula (IV), Formula (V), Formula (VI), Formula (VII), Formula (VIII), Formula (IX), Formula (X), Formula (XI), Formula (XII), Formula (XIII), or Formula (XIV). In some embodiments, the compound of Formula (I) or a form thereof that is administered to a subject is a compound described herein.

[2090] In a specific embodiment, the methods for preventing a disease described herein prevent the onset or development of one or symptoms of the disease. In another embodiment, the methods for preventing a disease described herein prevent the recurrence of the disease or delays the recurrence of the disease. In another embodiment, the methods for treating a disease described herein has one, two or more of the effects: (i) reduce or ameliorate the severity of the disease; (ii) inhibit the progression of the disease; (iii) reduce hospitalization of a subject; (iv) reduce hospitalization length for a subject; (v) increase the survival of a subject; (vi) improve the quality of life of a subject; (vii) reduce the number of symptoms associated with the disease; (viii) reduce or ameliorates the severity of a symptom(s) associated with the disease; (ix) reduce the duration of a symptom(s) associated with the disease; (x) prevent the recurrence of a symptom associated with the disease; (xi) inhibit the development or onset of a symptom of the disease; and/or (xii) inhibit of the progression of a symptom associated with the disease.

[2091] In certain embodiments, the disease or disorder prevented and/or treated in accordance with a method described herein is a disease or disorder associated with a gene listed in Table 1 or Table 7. In specific embodiments, the disease or disorder prevented and/or treated in accordance with a method described herein is leukemia, acute myeloid leukemia, colon cancer, gastric cancer, macular degeneration, acute monocytic leukemia, breast cancer, combined methylmalonic aciduria and homocystinuria, cblC type, hepatocellular carcinoma, cone-rod dystrophy, alveolar soft part sarcoma, myeloma, skin melanoma, prostatitis, pancreatitis, pancreatic cancer, retinitis, adenocarcinoma, adenoiditis, adenoid cystic carcinoma, cataract, retinal degeneration, gastrointestinal stromal tumor, Wegener's granulomatosis, sarcoma, myopathy, prostate adenocarcinoma, Alzheimer's disease, hyperprolinemia, acne, tuberculosis, succinic semialdehyde dehydrogenase deficiency, esophagitis, mental retardation, esophageal adenocarcinoma, glycine encephalopathy, Crohn's disease, spina bifida, tuberculosis, autosomal recessive disease, schizophrenia, neural tube defects, lung cancer, myelodysplastic syndromes, amyotropic lateral sclerosis, neuronitis, germ cell tumors, Parkinson's disease, talipes equinovarus, dystrophinopathies, Hodgkin's lymphoma, ovarian cancer, non-Hodgkin's lymphoma, multiple myeloma, chronic myeloid leukemia, ischemia, acute lymphoblastic leukemia, renal cell carcinoma, transitional cell carcinoma, colorectal cancer, chronic lymphocytic leukemia, anaplastic large cell lymphoma, kidney cancer, cerebritis, bladder related disorders, breast cancer, cervical cancer, cleft lip, cleft palate, cervicitis, spasticity, lipoma, scleroderma, Gitelman syndrome, poliomyelitis, paralysis, Aagenaes syndrome, or oculomotor nerve paralysis.

[2092] In specific embodiments, the disease or disorder prevented and/or treated in accordance with a method described herein is basal cell carcinoma, goblet cell metaplasia, or a malignant glioma. In other specific embodiments, the disease or disorder prevented and/or treated in accordance with a method described herein is a cancer of the liver, breast, lung, prostate, cervix, uterus, colon, pancreas, kidney, stomach, bladder, ovary, or brain.

[2093] In other specific embodiments, the disease or disorder prevented and/or treated in accordance with a method described herein is Duchenne muscular dystrophy, Beckers muscular dystrophy, Facioscapulohumeral muscular dystrophy, Limb-girdle muscular dystrophy, Charcot-Marie-Tooth disease (CMT), spinal muscular atrophy, Huntington's disease, amyotrophic lateral sclerosis, cystic fibrosis, congenital myopathies, muscle dystrophies, Alzheimer's disease, Parkinson's disease, schizophrenia, bipolar disorders, cognitive impairment, hereditary sensory and autonomic neuropathies, diseases of chronic inflammation, immune check point-dependent diseases, retinitis pigmentosa, aniridia, Dravet disease, or an epilepsy.

[2094] In certain embodiments, the disease prevented and/or treated in accordance with a method described herein is a disease caused by expression of one or more aberrant RNA transcripts, including a cancer amenable to treatment by downregulation of a gene or isoform thereof as described herein. In specific embodiments, cancers that can be prevented and/or treated in accordance with a method described herein include, but are not limited to, cancer of the head, neck, eye, mouth, throat, esophagus, esophagus, chest, bone, lung, kidney, colon, rectum or other gastrointestinal tract organs, stomach, spleen, skeletal muscle, subcutaneous tissue, prostate, breast, ovaries, testicles or other reproductive organs, skin, thyroid, blood, lymph nodes, kidney, liver, pancreas, brain or central nervous system.

[2095] Specific examples of cancers that can be prevented and/or treated in accordance with the methods provided herein include, but are not limited to, the following: renal cancer, kidney cancer, glioblastoma multiforme, metastatic breast cancer; breast carcinoma; breast sarcoma; neurofibroma; neurofibromatosis; pediatric tumors; neuroblastoma; malignant melanoma; carcinomas of the epidermis; leukemias such as but not limited to, acute leukemia, acute lymphocytic leukemia, acute myelocytic leukemias such as myeloblastic, promyelocytic, myelomonocytic, monocytic, erythroleukemia leukemias and myclodysplastic syndrome, chronic leukemias such as but not limited to, chronic myclocytic (granulocytic) leukemia, chronic lymphocytic leukemia, hairy cell leukemia; polycythemia vera; lymphomas such as but not limited to Hodgkin's disease, non-Hodgkin's disease; multiple myelomas such as but not limited to smoldering multiple mycloma, nonsecretory myeloma, osteosclerotic myeloma, plasma cell leukemia, solitary plasmacytoma and extramedullary plasmacytoma; Waldenstrom's macroglobulinemia; monoclonal gammopathy of undetermined significance; benign monoclonal gammopathy; heavy chain disease; bone cancer and connective tissue sarcomas such as but not limited to bone sarcoma, myeloma bone disease, multiple myeloma, cholesteatoma-induced bone osteosarcoma, Paget's disease of bone, osteosarcoma, chondrosarcoma, Ewing's sarcoma, malignant giant cell tumor, fibrosarcoma of bone, chordoma, periosteal sarcoma, soft-tissue sarcomas, angiosarcoma (hemangiosarcoma), fibrosarcoma, Kaposi's sarcoma, leiomyosarcoma, liposarcoma, lymphangiosarcoma, neurilemmoma, rhabdomyosarcoma, and synovial sarcoma; brain tumors such as but not limited to, glioma, astrocytoma, brain stem glioma, ependymoma, oligodendroglioma, nonglial tumor, acoustic neurinoma, craniopharyngioma, medulloblastoma, meningioma, pineocytoma, pineoblastoma, and primary brain lymphoma; breast cancer including but not limited to adenocarcinoma, lobular (small cell) carcinoma, intraductal carcinoma, medullary breast cancer, mucinous breast cancer, tubular breast cancer, papillary breast cancer, Paget's disease (including juvenile Paget's disease) and inflammatory breast cancer; adrenal cancer such as but not limited to pheochromocytom and adrenocortical carcinoma; thyroid cancer such as but not limited to papillary or follicular thyroid cancer, medullary thyroid cancer and anaplastic thyroid cancer; pancreatic cancer such as but not limited to, insulinoma, gastrinoma, glucagonoma, vipoma, somatostatin-secreting tumor, and carcinoid or islet cell tumor; pituitary cancers such as but limited to Cushing's disease, prolactin-secreting tumor, acromegaly, and diabetes insipius; eye cancers such as but not limited to ocular melanoma such as iris melanoma, choroidal melanoma, and cilliary body melanoma, and retinoblastoma; vaginal cancers such as squamous cell carcinoma, adenocarcinoma, and melanoma; vulvar cancer such as squamous cell carcinoma, melanoma, adenocarcinoma, basal cell carcinoma, sarcoma, and Paget's disease; cervical cancers such as but not limited to, squamous cell carcinoma, and adenocarcinoma; uterine cancers such as but not limited to endometrial carcinoma and uterine sarcoma; ovarian cancers such as but not limited to, ovarian epithelial carcinoma, borderline tumor, germ cell tumor, and stromal tumor; cervical carcinoma; esophageal cancers such as but not limited to, squamous cancer, adenocarcinoma, adenoid cyctic carcinoma, mucoepidermoid carcinoma, adenosquamous carcinoma, sarcoma, melanoma, plasmacytoma, verrucous carcinoma, and oat cell (small cell) carcinoma; stomach cancers such as but not limited to, adenocarcinoma, fungating (polypoid), ulcerating, superficial spreading, diffusely spreading, malignant lymphoma, liposarcoma, fibrosarcoma, and carcinosarcoma; colon cancers; KRAS-mutated colorectal cancer; PD-1-dependent cancers; PD-1L-dependent cancers; colon carcinoma; rectal cancers; liver cancers such as but not limited to hepatocellular carcinoma and hepatoblastoma, gallbladder cancers such as adenocarcinoma; cholangiocarcinomas such as but not limited to papillary, nodular, and diffuse; lung cancers such as KRAS-mutated non-small cell lung cancer, non-small cell lung cancer, squamous cell carcinoma (epidermoid carcinoma), adenocarcinoma, large-cell carcinoma and small-cell lung cancer; lung carcinoma; testicular cancers such as but not limited to germinal tumor, seminoma, anaplastic, classic (typical), spermatocytic, nonseminoma, embryonal carcinoma, teratoma carcinoma, choriocarcinoma (yolk-sac tumor), prostate cancers such as but not limited to, androgen-independent prostate cancer, androgen-dependent prostate cancer, adenocarcinoma, leiomyosarcoma, and rhabdomyosarcoma; penal cancers; oral cancers such as but not limited to squamous cell carcinoma; basal cancers; salivary gland cancers such as but not limited to adenocarcinoma, mucoepidermoid carcinoma, and adenoidcystic carcinoma; pharynx cancers such as but not limited to squamous cell cancer, and verrucous; skin cancers such as but not limited to, basal cell carcinoma, squamous cell carcinoma and melanoma, superficial spreading melanoma, nodular melanoma, lentigo malignant melanoma, acral lentiginous melanoma; kidney cancers such as but not limited to renal cell cancer, adenocarcinoma, hypernephroma, fibrosarcoma, transitional cell cancer (renal pelvis and/or uterer); renal carcinoma; Wilms' tumor; bladder cancers such as but not limited to transitional cell carcinoma, squamous cell cancer, adenocarcinoma, carcinosarcoma. In addition, cancers include myxosarcoma, osteogenic sarcoma, endotheliosarcoma, lymphangioendotheliosarcoma, mesotheliorna, synovioma, hemangioblastoma, epithelial carcinoma, cystadenocarcinoma, bronchogenic carcinoma, sweat gland carcinoma, sebaceous gland carcinoma, papillary carcinoma and papillary adenocarcinomas.

[2096] In certain embodiments cancers that can be prevented and/or treated in accordance with the methods provided herein include, the following: pediatric solid tumor, Ewing's sarcoma, Wilms tumor, neuroblastoma, neurofibroma, carcinoma of the epidermis, malignant melanoma, cervical carcinoma, colon carcinoma, lung carcinoma, renal carcinoma, breast carcinoma, breast sarcoma, metastatic breast cancer, HIV-related Kaposi's sarcoma, prostate cancer, androgen-independent prostate cancer, androgen-dependent prostate cancer, neurofibromatosis, lung cancer, non-small cell lung cancer, KRAS-mutated non-small cell lung cancer, malignant melanoma, melanoma, colon cancer, KRAS-mutated colorectal cancer, glioblastoma multiforme, renal cancer, kidney cancer, bladder cancer, ovarian cancer, hepatocellular carcinoma, thyroid carcinoma, rhabdomyosarcoma, acute myeloid leukemia, and multiple myeloma.

[2097] In certain embodiments, cancers and conditions associated therewith that are prevented and/or treated in accordance with the methods provided herein are breast carcinomas, lung carcinomas, gastric carcinomas, esophageal carcinomas, colorectal carcinomas, liver carcinomas, ovarian carcinomas, thecomas, arrhenoblastomas, cervical carcinomas, endometrial carcinoma, endometrial hyperplasia, endometriosis, fibrosarcomas, choriocarcinoma, head and neck cancer, nasopharyngeal carcinoma, laryngeal carcinomas, hepatoblastoma, Kaposi's sarcoma, melanoma, skin carcinomas, hemangioma, cavernous hemangioma, hemangioblastoma, pancreas carcinomas, retinoblastoma, astrocytoma, glioblastoma, Schwannoma, oligodendroglioma, medulloblastoma, neuroblastomas, rhabdomyosarcoma, osteogenic sarcoma, leiomyosarcomas, urinary tract carcinomas, thyroid carcinomas, Wilm's tumor, renal cell carcinoma, prostate carcinoma, abnormal vascular proliferation associated with phakomatoses, edema (such as that associated with brain tumors), or Meigs' syndrome. In specific embodiment, the cancer astrocytoma, an oligodendroglioma, a mixture of oligodendroglioma and an astrocytoma elements, an ependymoma, a meningioma, a pituitary adenoma, a primitive neuroectodermal tumor, a medullblastoma, a primary central nervous system (CNS) lymphoma, or a CNS germ cell tumor. In specific embodiments, the cancer treated in accordance with the methods provided herein is an acoustic neuroma, an anaplastic astrocytoma, a glioblastoma multiforme, or a meningioma. In other specific embodiments, the cancer treated in accordance with the methods provided herein is a brain stem glioma, a craniopharyngioma, an ependyoma, a juvenile pilocytic astrocytoma, a medulloblastoma, an optic nerve glioma, primitive neuroectodermal tumor, or a rhabdoid tumor.

[2098] Specific examples of conditions caused by expression of one or more aberrant RNA transcripts that can be prevented and/or treated in accordance with the methods described herein include cystic fibrosis, muscular dystrophy, polycystic autosomal-dominant kidney disease, cancer-induced cachexia, benign prostatic hyperplasia, rheumatoid arthritis, psoriasis, atherosclerosis, obesity, retinopathies (including diabetic retinopathy and retinopathy of prematurity), retrolental fibroplasia, neovascular glaucoma, age-related macular degeneration, exudative macular degeneration, thyroid hyperplasias (including Grave's disease), corneal and other tissue transplantation, epidemic keratoconjunctivitis, Vitamin A deficiency, contact lens overwear, atopic keratitis, superior limbic keratitis, and pterygium keratitis sicca, viral infections, inflammation associated with viral infections, chronic inflammation, lung inflammation, nephrotic syndrome, preeclampsia, ascites, pericardial effusion (such as that associated with pericarditis), pleural effusion, Sjogren's syndrome, acne rosacea, phylectenulosis, syphilis, lipid degeneration, chemical burns, bacterial ulcers, fungal ulcers, Herpes simplex infection, Herpes zoster infections, protozoan infections, Mooren's ulcer, Terrien's marginal degeneration, marginal keratolysis, systemic lupus, polyarteritis, trauma, Wegener's sarcoidosis, Paget's disease, scleritis, Stevens-Johnson's disease, pemphigoid, radial keratotomy, Eales' disease, Behcet's disease, sickle cell anemia, pseudoxanthoma elasticum, Stargardt's disease, pars planitis, chronic retinal detachment, vein occlusion, artery occlusion, carotid obstructive disease, chronic uveitis/vitritis, ocular histoplasmosis, Mycobacteria infections, Lyme's disease, Best's disease, myopia, optic pits, hyperviscosity syndromes, toxoplasmosis, sarcoidosis, trauma, post-laser complications, diseases associated with rubeosis (neovascularization of the iris and of the angle), and diseases caused by the abnormal proliferation of fibrovascular or fibrous tissue, including all forms of prolific vitreoretinopathy. Certain examples of non-neoplastic conditions that can be prevented and/or treated in accordance with the methods described herein include viral infections, including but not limited to, those associated with viruses belonging to Flaviviridae, flavivirus, pestivirus, hepacivirus, West Nile virus, hepatitis C virus (HCV) or human papilloma virus (HPV).

[2099] Particular examples of conditions caused by expression of one or more of aberrant RNA transcripts that can be prevented and/or treated in accordance with the methods described herein include Duchenne muscular dystrophy, Beckers muscular dystrophy, Facioscapulohumeral muscular dystrophy, Limb-girdle muscular dystrophy, Charcot-Marie-Tooth disease (CMT), spinal muscular atrophy, Huntington's disease, amyotrophic lateral sclerosis, cystic fibrosis, congenital myopathies, muscle dystrophies, Alzheimer's disease, Parkinson's disease, schizophrenia, bipolar disorders, cognitive impairment, hereditary sensory and autonomic neuropathies, diseases of chronic inflammation, immune check point-dependent diseases, retinitis pigmentosa, aniridia, Dravet disease, or an epilepsy.

### Artificial Gene Constructs

[2100] Also provided herein are artificial gene constructs comprising a DNA sequence encoding exons and one or more introns, wherein the nucleotide sequence of at least one intron encodes an intronic REMS downstream of the nucleotide sequence encoding a branch point and the nucleotide sequence encoding a 3′ splice site in 5′ to 3′ order, and artificial gene constructs comprising an RNA sequence that comprises exons and one or more introns, wherein at least one intron comprises a branch point, a 3′ splice site and an intronic REMS in 5′ to 3′ order. The DNA sequence described herein can be or derived from, for example, a genomic DNA sequence or a DNA analog thereof. The RNA sequence described herein can be or derived from, for example, a precursor RNA transcript or an RNA analog thereof. As used herein, the term “artificial gene construct” refers to a DNA or RNA gene construct that comprises a nucleotide sequence not found in nature.

[2101] In another aspect, provided herein is an artificial gene construct comprising an RNA sequence comprising two exons and an intron, wherein one exon is upstream of the intron and the other exon is downstream of the intron, wherein the RNA nucleotide sequence of the intron comprises in 5′ to 3′ order: a first 5′ splice site, a first branch point, a first 3′ splice site, an iREMS, a second branch point and a second 3′ splice site, wherein the iREMS comprises an RNA sequence GAgurngn (SEQ ID NO: 2), and wherein r is adenine or guanine and n is any nucleotide.

[2102] In another aspect, provide herein is an artificial gene construct comprising an RNA sequence comprising two exons and an intron, wherein one exon is upstream of the intron and the other exon is downstream of the intron, wherein the RNA nucleotide sequence of the intron comprises in 5′ to 3′ order: an iREMS, a first branch point and a first 3′ splice site, wherein the iREMS comprises an RNA sequence GAgurngn (SEQ ID NO: 2), and wherein r is adenine or guanine and n is any nucleotide.

[2103] In another aspect, provided herein is an artificial gene construct comprising an RNA sequence comprising two exons and an intron, wherein the RNA sequence comprises exonic and intronic elements illustrated in FIG. 1A.

[2104] In another aspect, provided herein is an artificial gene construct comprising an RNA sequence comprising two exons and an intron, wherein the RNA sequence comprises exonic and intronic elements illustrated in FIG. 1B.

[2105] In another aspect, provided herein is an artificial gene construct comprising an RNA sequence comprising two exons and an intron, wherein the RNA sequence comprises exonic and intronic elements illustrated in FIG. 1C.

[2106] In another aspect, provided herein is an artificial gene construct comprising a DNA sequence encoding two exons and an intron, wherein the nucleotide sequence encoding one exon is upstream of the nucleotide sequence encoding the intron and the nucleotide sequence encoding the other exon is downstream of the nucleotide sequence encoding the intron, wherein the nucleotide sequence encoding the intron comprises in 5′ to 3′ order: a nucleotide sequence encoding a first 5′ splice site, a nucleotide sequence encoding a first branch point, a nucleotide sequence encoding a first 3′ splice site, an iREMS, a nucleotide sequence encoding a second branch point and a nucleotide sequence encoding a second 3′ splice site, wherein the iREMS comprises a DNA sequence GAgtrngn (SEQ ID NO: 4), and wherein r is adenine or guanine and n is any nucleotide.

[2107] In another aspect, provide herein is an artificial gene construct comprising a DNA sequence encoding two exons and an intron, wherein the nucleotide sequence encoding one exon is upstream of the nucleotide sequence encoding the intron and the nucleotide sequence encoding the other exon is downstream of the nucleotide sequence encoding the intron, wherein the nucleotide sequence encoding the intron comprises in 5′ to 3′ order: an iREMS, a nucleotide sequence encoding a first branch point and a nucleotide sequence encoding a first 3′ splice site, wherein the iREMS comprises an DNA sequence GAgtrngn (SEQ ID NO: 4), wherein r is adenine or guanine and n is any nucleotide.

[2108] In another aspect, provide herein is an artificial gene construct comprising a DNA sequence encoding two exons and an intron, wherein the DNA sequence comprises exonic and intronic elements illustrated in FIG. 1A.

[2109] In another aspect, provide herein is an artificial gene construct comprising a DNA sequence encoding two exons and an intron, wherein the DNA sequence comprises exonic and intronic elements illustrated in FIG. 1B.

[2110] In another aspect, provide herein is an artificial gene construct comprising a DNA sequence encoding two exons and an intron, wherein the DNA sequence comprises exonic and intronic elements illustrated in FIG. 1C.

[2111] In one aspect, provided herein are artificial gene constructs comprising an intronic REMS. In one embodiment, an artificial gene construct comprises genomic DNA or DNA encoding exons and one, two or more introns, wherein a nucleotide sequence encoding an intronic REMS, which may be upstream or downstream of a nucleotide sequence encoding a branch point and a nucleotide sequence encoding a 3′ splice site, is modified to introduce a nucleotide sequence encoding the intronic REMS. In another embodiment, an artificial gene construct comprises DNA encoding exons, an intronic REMS, a 3′ splice site(s) and a branch point(s) sequence, wherein a nucleotide sequence encoding an intronic REMS, which may be upstream or downstream of at least one nucleotide sequence encoding a branch point and at least one nucleotide sequence encoding a 3′ splice site, is modified to introduce a nucleotide sequence encoding an intronic REMS. In another embodiment, an artificial gene construct comprises genomic DNA or DNA encoding exons and one, two or more introns, wherein a nucleotide sequence encoding an intronic REMS, which may be upstream or downstream of a nucleotide sequence encoding a branch point and a nucleotide sequence encoding a 3′ splice site, is introduced into an intron by genetic engineering. In another embodiment, an artificial gene construct comprises genomic DNA or DNA encoding exons and one, two or more introns, wherein a nucleotide sequence encoding an intronic REMS, which may be upstream or downstream of a nucleotide sequence encoding a branch point and a nucleotide sequence encoding a 3′ splice site, is endogenously present in an intron. In some embodiments, an artificial gene construct comprises a DNA sequence that is genetically engineered to introduce a nucleotide sequence encoding an intronic REMS, wherein the location of the intronic REMS is as illustrated in any of FIGS. 1A-1C. In some embodiments, an artificial gene construct comprises a DNA sequence that is genetically engineered to comprise one, two, or all of the following: intronic REMS, branch point, and 3′ splice site. In some embodiments, an artificial gene construct comprises a DNA sequence that is genetically engineered to comprise a branch point, a 3′ splice site and an intronic REMS, in 5′ to 3′ order. In certain embodiments, the DNA sequence chosen to be used in the production of an artificial gene construct may contain a nucleotide sequence encoding an intronic REMS and an additional nucleotide sequence encoding an intronic REMS or a branch point or a 3′ splice site sequence is introduced. In specific embodiments, the nucleotide sequence encoding an intronic REMS or a branch point or a 3′ splice site is a non-endogenous sequence, i.e., a sequence not naturally found in the DNA sequence of the artificial gene construct. In certain embodiments, the artificial gene construct comprises other elements, such as a promoter (e.g., a constitutive, inducible or tissue specific promoter), a Poly(A) site, a transcription termination site, and a transcription binding site(s). In certain embodiments, the artificial gene construct comprises at least the sequences to encode a therapeutic protein. In some embodiments, the artificial gene construct comprises at least an intronic REMS for a gene listed in Table 1-7. In a specific embodiment, the artificial gene construct further comprises exons of a gene listed in Table 1-7. In certain embodiments, the artificial gene construct comprises at least the exons of a detectable reporter gene, such as green fluorescent protein (GFP), yellow fluorescent protein (YFP), red fluorescent protein, beta galactosidase, renilla luciferase, firefly luciferase, etc.

[2112] In certain embodiments, an artificial gene construct is produced as follows: a nucleotide sequence encoding an intronic REMS is introduced into a nucleotide sequence encoding an existing intronic branch point and intronic 3′ splice site of genomic DNA or DNA, wherein the DNA encodes two or more exons and one or more introns, and wherein the nucleotide sequence encoding the intronic REMS is downstream (in a preferred embodiment) or upstream of a nucleotide sequence encoding a branch point and a 3′ splice site. In some embodiments, an artificial gene construct is produced as follows: a nucleotide sequence encoding an intronic REMS is introduced downstream (in a preferred embodiment) or upstream of a nucleotide sequence encoding a branch point and a 3′ splice site of genomic DNA or DNA, wherein the DNA encodes two or more exons and an intron(s). In a specific embodiment, the nucleotide sequence encoding the intronic REMS is introduced internally within a nucleotide sequence encoding an intron. In certain embodiments, an artificial gene construct is produced as follows: a nucleotide sequence encoding an intronic REMS, a nucleotide sequence encoding a branch point, and a nucleotide sequence encoding a 3′ splice site are introduced into a cDNA, wherein the nucleotide sequence encoding the intronic REMS may be upstream of the branch point and 3′ splice site, respectively; or may be downstream (in a preferred embodiment) of the 3′ splice site and branch point, respectively. The nucleotide sequence encoding the intronic REMS functions as a 5′ splice site. In certain embodiments, the nucleotide sequence encoding the intronic REMS is internally within an intron. In a specific embodiment, the genomic DNA or DNA chosen for use in the production of an artificial gene construct does not contain one or more of a nucleotide sequence encoding an intronic REMS or a nucleotide sequence encoding a branch point or a nucleotide sequence encoding a 3′ splice site. In certain embodiments, the genomic DNA or DNA chosen for use in the production of an artificial gene construct contains an intronic REMS and an additional intronic REMS is introduced. In some embodiments, in introducing a nucleotide sequence encoding an intronic REMS into a DNA sequence, care should be taken so as not to disrupt an open reading frame or introduce a stop codon. The introduction of a nucleotide sequence encoding an intronic REMS into a DNA sequence may or may not result in an amino acid change at the protein level. In certain embodiments, the introduction of a nucleotide sequence encoding an intronic REMS into a DNA sequence results in an amino acid change at the protein level. In some embodiments, this amino acid change is a conservative amino acid substitution. In other embodiments, the introduction of a nucleotide sequence encoding an intronic REMS into a DNA sequence does not result in an amino acid change at the protein level. Techniques known to one of skill in the art may be used to introduce an intronic REMS and other elements, such as a branch point sequence or 3′ splice site sequence into a DNA sequence, e.g., gene editing techniques such as the CRISPR-Cas approach, Transcription Activator-Like Effector Nucleases (TALENs), or Zinc finger nucleases (ZFNs) may be used.

[2113] In certain embodiments, an artificial gene construct comprises an RNA sequence comprising exons and one, two or more introns, wherein an intronic REMS 5′ splice site, which is downstream of a 3′ splice site, is introduced into an intron by genetic engineering. In another embodiment, an artificial gene construct comprises an RNA sequence comprising exons, one, two or more introns, a 5′ splice site(s), a 3′ splice site(s) and a branch point(s), wherein an intronic REMS, which is downstream of a 3′ splice site, is introduced into an intron by genetic engineering. In some embodiments, an artificial gene construct comprises a DNA sequence that is genetically engineered to comprise one, two, or all of the following: branch point, 3′ splice site and/or intronic REMS. In some embodiments, an artificial gene construct comprises a DNA sequence that is genetically engineered to comprise a branch point, a 3′ splice site and an intronic REMS, in 5′ to 3′ order. In another embodiment, an artificial gene construct comprises an RNA sequence comprising exons and one or more introns, wherein at least one intron comprises in 5′ to 3′ order: a branch point, a 3′ splice site and an intronic REMS, wherein the intronic REMS is endogenously present in an intron. In another embodiment, an artificial gene construct comprises an RNA sequence comprising exons, endogenously having a 5′ splice site(s), a 3′ splice site(s) and a branch point(s), wherein an intron, which is upstream of a 3′ splice site, is modified to introduce a non-endogenous branch point, a non-endogenous 3′ splice site and a non-endogenous intronic REMS. In specific embodiments, the intronic REMS is non-endogenous, i.e., not naturally found in the RNA sequence of the artificial gene construct. In certain embodiments, the artificial gene construct comprises other elements, such as a promoter (e.g., a tissue-specific promoter or constitutively expressed promoter), 5′ untranslated region, 3′ untranslated region, a binding site(s) for RNA binding proteins, a small molecule RNA sensor(s), e.g., riboswitches, stem-loop structures, and/or internal ribosome entry sites (IRES), etc. In certain embodiments, the artificial gene construct comprises at least the introns of a gene encoding a therapeutic protein. In some embodiments, the artificial gene construct comprises at least the introns of a gene listed in Tables 1-7. In a specific embodiment, the artificial gene construct further comprises exons of a gene listed in Table 1-7. In a specific embodiment, the RNA transcript chosen to be used in the production of an artificial gene construct does not contain an intronic REMS. In certain embodiments, the RNA transcript chosen to use in the production of an artificial gene construct contains an intronic REMS and an additional exonic or intronic REMS is introduced. In certain embodiments, the RNA transcript chosen to use in the production of an artificial gene construct contains an intronic REMS and an additional intronic REMS is introduced. In other embodiments, the artificial gene construct comprises at least one intron and two exons of a detectable reporter gene, such as green fluorescent protein (GFP), yellow fluorescent protein (YFP), red fluorescent protein, beta galactosidase, renilla luciferase, firefly luciferase, etc.

[2114] In certain embodiments, an artificial gene construct is produced as follows: an intronic REMS is introduced into an existing 5′ splice site of precursor RNA, wherein the RNA comprises two or more exons and one or more introns, and wherein an intronic REMS is upstream of a branch point sequence and a 3′ splice site sequence. In some embodiments, an artificial gene construct is produced as follows: an intronic REMS is introduced upstream of a 3′ splice site of a precursor RNA, wherein the RNA comprises two or more exons and an intron(s). In a specific embodiment, the intronic REMS is introduced internally within an intron. In certain embodiments, an artificial gene construct is produced as follows: a branch point, a 3′ splice site and an intronic REMS are introduced into a precursor RNA, wherein the REMS may be either downstream or upstream of the branch point and 3′ splice site. In certain embodiments, an artificial gene construct is produced as follows: a branch point, a 3′ splice site and an intronic REMS are introduced into an mRNA, wherein the REMS may be either downstream or upstream of the branch point and 3′ splice site. The intronic REMS functions as a 5′ splice site. In some embodiments, in introducing an intronic REMS into an RNA sequence, care should be taken so as not to disrupt an open reading frame or introduce a stop codon. The introduction of an intronic REMS into an RNA transcript may or may not result in an amino acid change at the protein level. In certain embodiments, the introduction of an intronic REMS into an RNA transcript results in an amino acid change at the protein level. In some embodiments, this amino acid change is a conservative amino acid substitution. In other embodiments, the introduction of an intronic REMS into an RNA transcript does not result in an amino acid change at the protein level. Techniques known to one of skill in the art may be used to introduce an intronic REMS and other elements, such as a branch point or 3′ splice site into an RNA transcript.

[2115] In some embodiments, an artificial gene construct is present in a viral vector (e.g., an adeno-associated virus (AAV), self-complimentary adeno-associated virus, adenovirus, retrovirus, lentivirus (e.g., Simian immunodeficiency virus, human immunodeficiency virus, or modified human immunodeficiency virus), Newcastle disease virus (NDV), herpes virus (e.g., herpes simplex virus), alphavirus, vaccina virus, etc.), a plasmid, or other vector (e.g., non-viral vectors, such as lipoplexes, liposomes, polymerosomes, or nanoparticles).

[2116] In some embodiments, the artificial gene construct is an RNA molecule modified to enable cellular uptake. In certain embodiments, the artificial gene construct is an RNA molecule containing pseudouridine or other modified/artificial nucleotides for enhanced cellular uptake and gene expression.

[2117] The use of an artificial gene construct described herein in gene therapy allows one to regulate the amount and type of a protein produced from the construct depending on whether or not a compound described herein is present. The compound is essentially a tunable switch that, depending on the amount and duration of the dose of the compound, regulates the amount and type of protein produced.

[2118] In certain embodiments, an RNA transcript transcribed from an artificial gene construct that is DNA would not produce or produce substantially less functional protein in the presence of a compound described herein than the amount of functional protein produced in the absence of a compound described herein. For example, if the artificial gene construct comprises a nucleotide sequence encoding an intronic REMS, which is downstream of an intronic nucleotide sequence encoding a branch point and a 3′ splice site, then the creation of an intronic exon would ultimately result in less amount of the original protein (i.e., without amino acid sequence derived from the intronic exon) being produced in the presence of a compound described herein. Alternatively, in certain embodiments, an RNA transcript transcribed from an artificial gene construct that is DNA would produce or would produce substantially less functional protein in the presence of a compound described herein than the amount of functional protein produced in the absence of a compound described herein.

[2119] In certain embodiments, an artificial gene construct or vector comprising an artificial gene construct is used in cell culture. For example, in a cell(s) transfected with an artificial gene construct or transduced with a vector comprising an artificial gene construct, the amount and type of a protein produced from the artificial gene construct can be altered depending upon whether or not a compound described herein is contacted with the transfected cell(s). For example, if the artificial gene construct comprises a nucleotide sequence encoding an intronic REMS, which is downstream of a nucleotide sequence encoding a branch point and a 3′ splice site, then the likelihood of producing an intronic exon would be less in the absence of the compound. Thus, the use of an artificial gene construct described herein allows one to regulate the amount and type of a protein produced from the construct depending on whether or not a compound described herein is present. In other words, a compound described herein is essentially a switch that regulates the amount and type of protein produced. This regulation of the production of protein could be useful, e.g., when trying to assess the role of certain genes or the effects of certain agents on pathways. The amount of the protein produced can be modified based on the amount of a compound described herein that is contacted with the transfected cell and/or how long the compound is contacted with the transfected cell.

[2120] In certain embodiments, an animal (e.g., a non-human animal, such as a mouse, rat, fly, etc.) is engineered to contain an artificial gene construct or a vector comprising an artificial gene construct. Techniques known to one of skill in the art may be used to engineer such animals. The amount of protein produced by this engineered animal can be regulated by whether or not a compound described herein is administered to the animal. The amount of the protein produced can be titrated based on the dose and/or the duration of administration of a compound described herein to the engineered animal. In certain embodiments, the artificial gene construct encodes a detectable reporter gene, such as green fluorescent protein (GFP), yellow fluorescent protein (YFP), red fluorescent protein, beta galactosidase, renilla luciferase, firefly luciferase, etc. In accordance with this embodiment, the engineered animal may be used to monitor development at different stages, visualize tissue function, etc. In other embodiments, the artificial gene construct encodes a therapeutic gene product, such as described the gene product of a gene in Tables 2-7 and 1. In accordance with this embodiment, the engineered animal may be used to monitor development at different stages or in functional biological studies where a certain protein or protein isoform needs to be expressed only for a period of time and not constitutively, etc.

[2121] In certain embodiments, an artificial gene construct or a vector comprising an artificial gene construct are used in gene therapy. Non-limiting examples of vectors include, but are not limited to, plasmids and viral vectors, such as vectors derived from replication defective retroviruses, adenoviruses, adeno-associated viruses and baculoviruses. The vector can be an RNA vector or preferably a DNA vector.

### Gene Therapy

[2122] In another aspect, provided herein are artificial gene constructs or vectors comprising an artificial gene construct for use in gene therapy. The use of an artificial gene construct described herein in gene therapy allows one to regulate the amount and type of a protein produced from the construct depending on whether or not a compound described herein is present. The compound is essentially a switch that regulates the amount and type of protein produced.

[2123] In certain embodiments, an RNA transcript transcribed from an artificial gene construct that is DNA would not produce or would produce substantially more protein in the absence of a compound described herein than the amount of protein produced in the presence of a compound described herein. In certain embodiments, an RNA transcript transcribed from an artificial gene construct would not produce or would produce substantially more protein in the absence of a compound described herein than the amount of protein produced in the presence of a compound described herein. For example, if the artificial gene construct comprises a nucleotide sequence encoding an intronic REMS, which is downstream of a nucleotide sequence encoding a branch point and a 3′ splice site, then the likelihood of producing an intronic exon would be less in the absence of a compound described herein, which would ultimately result in more amount of the original protein (i.e., without amino acid sequence derived from the intronic exon) being produced. Thus, the use of an artificial gene construct or a vector comprising an artificial gene construct may be useful in treating and/or preventing certain conditions or diseases associated with genes. The conditions or diseases may include those described herein. Alternatively, in certain embodiments, an RNA transcript transcribed from an artificial gene construct that is DNA would produce substantially less functional protein in the presence of a compound described herein than the amount of functional protein produced in the absence of a compound described herein. For example, in certain embodiments, if the artificial gene construct comprises a nucleotide sequence encoding an intronic REMS, the production of the original protein (i.e., without amino acid sequence derived from the intronic exon), which is a functional protein, would be reduced in the presence of a compound described herein. However, in the absence of a compound described herein, normal splicing would occur, and the production of the functional protein will not be reduced. The amount and type of the protein produced can be titrated based on dose and duration of dosing of the compound.

[2124] In a specific embodiment, the artificial gene construct used in gene therapy comprises an RNA sequence comprising two exons and an intron, wherein one exon is upstream of the intron and the other exon is downstream of the intron, wherein the RNA nucleotide sequence of the intron comprises in 5′ to 3′ order: a first 5′ splice site, a first branch point, a first 3′ splice site, an iREMS, a second branch point and a second 3′ splice site, wherein the iREMS comprises an RNA sequence GAgurngn (SEQ ID NO: 2), and wherein r is adenine or guanine and n is any nucleotide.

[2125] In another specific embodiment, the artificial gene construct used in gene therapy comprises an RNA sequence comprising two exons and an intron, wherein one exon is upstream of the intron and the other exon is downstream of the intron, wherein the RNA nucleotide sequence of the intron comprises in 5′ to 3′ order: an iREMS, a first branch point and a first 3′ splice site, wherein the iREMS comprises an RNA sequence GAgurngn (SEQ ID NO: 2), and wherein r is adenine or guanine and n is any nucleotide.

[2126] In another specific embodiment, the artificial gene construct used in gene therapy comprises an RNA sequence comprising two exons and an intron, wherein the RNA sequence comprises exonic and intronic elements illustrated in FIG. 1A.

[2127] In another specific embodiment, the artificial gene construct used in gene therapy comprises an RNA sequence comprising two exons and an intron, wherein the RNA sequence comprises exonic and intronic elements illustrated in FIG. 1B.

[2128] In another specific embodiment, the artificial gene construct used in gene therapy comprises an RNA sequence comprising two exons and an intron, wherein the RNA sequence comprises exonic and intronic elements illustrated in FIG. 1C.

[2129] In another specific embodiment, the artificial gene construct used in gene therapy comprises a DNA sequence encoding two exons and an intron, wherein the nucleotide sequence encoding one exon is upstream of the nucleotide sequence encoding the intron and the nucleotide sequence encoding the other exon is downstream of the nucleotide sequence encoding the intron, wherein the nucleotide sequence encoding the intron comprises in 5′ to 3′ order: a nucleotide sequence encoding a first 5′ splice site, a nucleotide sequence encoding a first branch point, a nucleotide sequence encoding a first 3′ splice site, an iREMS, a nucleotide sequence encoding a second branch point and a nucleotide sequence encoding a second 3′ splice site, wherein the iREMS comprises a DNA sequence GAgtrngn (SEQ ID NO: 4), wherein r is adenine or guanine and n is any nucleotide.

[2130] In another specific embodiment, the artificial gene construct used in gene therapy comprises a DNA sequence encoding two exons and an intron, wherein the nucleotide sequence encoding one exon is upstream of the nucleotide sequence encoding the intron and the nucleotide sequence encoding the other exon is downstream of the nucleotide sequence encoding the intron, wherein the nucleotide sequence encoding the intron comprises in 5′ to 3′ order: an iREMS, a nucleotide sequence encoding a first branch point and a nucleotide sequence encoding a first 3′ splice site, wherein the iREMS comprises an DNA sequence GAgtrngn (SEQ ID NO: 4), wherein r is adenine or guanine and n is any nucleotide.

[2131] In another specific embodiment, the artificial gene construct used in gene therapy comprises a DNA sequence encoding two exons and an intron, wherein the DNA sequence comprises exonic and intronic elements illustrated in FIG. 1A.

[2132] In another specific embodiment, the artificial gene construct used in gene therapy comprises a DNA sequence encoding two exons and an intron, wherein the DNA sequence comprises exonic and intronic elements illustrated in FIG. 1B.

[2133] In another specific embodiment, the artificial gene construct used in gene therapy comprises a DNA sequence encoding two exons and an intron, wherein the DNA sequence comprises exonic and intronic elements illustrated in FIG. 1C.

[2134] An artificial gene construct, a vector comprising the artificial gene construct, or an RNA molecule comprising an artificial gene construct modified to enable cellular uptake may be introduced into cells or administered directly to patients. In one embodiment, an artificial gene construct or a vector comprising the artificial gene construct is introduced into cells ex vivo or in vivo. In a specific embodiment, an artificial gene construct or vector is introduced into a cell(s) ex vivo and the cell(s) may be administered to a subject. Various techniques known to one of skill in the art may be used to introduce an artificial gene construct or vector comprising the artificial gene construct into a cell(s), such as electroporation, transfection, transformation, etc. In another embodiment, an artificial gene construct or vector comprising the artificial gene construct is administered to a subject. The artificial gene construct or vector comprising the artificial gene construct may be administered to a subject by any technique known to one skilled in the art, e.g., intramuscularly, intravenously, subcutaneously, intradermally, topically, intrathecally, intraperitoneally, intratumorally, etc. In some embodiments, the artificial gene construct or vector comprising the artificial gene construct is administered to a subject systemically. In other embodiments, the artificial gene construct or vector comprising the artificial gene construct is administered to a subject locally.

### Altering Endogenous Genes

[2135] In another aspect, provided herein are method for altering an endogenous gene such that it contains a nucleotide sequence encoding an intronic REMS, or contains an additional nucleotide sequence encoding an intronic REMS (in other words, an intronic REMS not naturally found in the endogenous gene, i.e., a non-endogenous intronic REMS). In a specific embodiment, provided herein are method for altering an endogenous gene such that it contains a nucleotide sequence encoding an intronic REMS and contains a nucleotide sequence encoding a branch point and a nucleotide sequence encoding a 3′ splice site upstream of the nucleotide sequence encoding the intronic REMS. As used herein, the term “endogenous gene” refers to a gene naturally found in a cell or living subject. Techniques known to one of skill in the art can be used to introduce any one, two, or all of the following: a branch point, a 3′ splice site, and an intronic REMS into an endogenous gene, e.g., the CRISPR-Cas approach, TALEN, or ZFN may be used. In certain embodiments, a nucleotide sequence encoding an existing 5′ splice site can be replaced with an intronic REMS or an intronic REMS may be inserted internally within an intron. In certain embodiments, in introducing a nucleotide sequence encoding an intronic REMS into an endogenous gene, care should be taken so as not to disrupt an open reading frame or introduce a stop codon. The introduction of a nucleotide sequence encoding an intronic REMS into an endogenous gene may or may not result in an amino acid change at the protein level. In certain embodiments, the introduction of a nucleotide sequence encoding an intronic REMS into an endogenous gene results in an amino acid change at the protein level. In some embodiments, this amino acid change is a conservative amino acid substitution. In other embodiments, the introduction of a nucleotide sequence encoding an intronic REMS into an endogenous gene does not result in an amino acid change at the protein level.

[2136] In one aspect, provided herein are kits comprising, in a container, an artificial gene construct or a vector comprising an artificial construct. In certain embodiments, the kits further comprise a compound described herein, in a separate container, and/or a negative control, such as phosphate buffered saline or a compound that does not recognize an intronic REMS, in a separate container. In a specific embodiment, the kits further comprise a positive control, such as a compound described herein as a positive control. In some embodiments, the kits further comprise primers and/or antibodies, in one or more separate containers, for assessing the production of an mRNA transcript from an artificial gene construct and/or protein production therefrom.

[2137] In another aspect, provided herein are kits comprising, in one or more containers, the components and/or reagents necessary to produce an artificial gene construct and/or a vector comprising an artificial gene construct. In another aspect, provided herein are kits comprising, in one or more containers, the components and/or reagents necessary to alter an endogenous gene so that it contains a nucleotide sequence encoding an intronic REMS or an additional nucleotide sequence encoding an intronic REMS (in other words, a REMS not naturally found in the endogenous gene, i.e., a non-endogenous REMS). In another aspect, provided herein are kits comprising, in one or more containers, the components and/or reagents necessary to alter an endogenous gene so that it contains a nucleotide sequence encoding an intronic REMS and contains a nucleotide sequence encoding a branch point and a nucleotide sequence encoding a 3′ splice site upstream of the nucleotide sequence encoding the intronic REMS. In some embodiments, the kits further comprise primers and/or antibodies, in one or more separate containers, for assessing the production of an mRNA transcript from altered endogenous gene and/or protein production therefrom.

[2138] In another aspect, provided herein are kits comprising, in a container, a compound described herein, and instructions for use. In some embodiments, the kits further comprise a negative control, such as phosphate buffered saline or a compound that does not recognize an intronic REMS, in a separate container.

### Examples

[2139] To describe in more detail and assist in understanding the present description, the following non-limiting biological examples are offered to more fully illustrate the scope of the description and are not to be construed as specifically limiting the scope thereof. Such variations of the present description that may be now known or later developed, which would be within the purview of one skilled in the art to ascertain, are considered to fall within the scope of the present description and as hereinafter claimed. The example below illustrates the existence of an intronic recognition element for splicing modifier (REMS) that is important for the recognition of a compound described herein, and the binding of such a compound to the intronic REMS on a precursor RNA permits or enhances the splicing of the precursor RNA, and suggests the usefulness of the intronic REMS in combination with a compound described herein for modulating RNA splicing, and for modulating the amount of a gene product.

[2140] Materials and Methods

[2141] Cell treatment: GM04856 lymphocyte cells were diluted in a medium composed of DMEM, 10% FBS and 1x Pen/Strep to a concentration of 2.5e5 cells/mL. 2 mL (500K cells) were seeded in 6-well plates and recovered for 4 h at 37° C., 5% CO₂. Compound dilutions were prepared as 2× compound stock in medium (e.g. for final 100 nM, make a 200 nM stock). After 4 h recovery, 2 mL of the 2× compound stock were added to each well, resulting in 4 mL/well with 1× final compound concentration. The cells were incubated for ˜20 h at 37° C., 5% CO₂. After incubation, the cells were pelleted for 5 min at 1000 rpm. The supernatant was vacuum-removed and the cells were resuspended in 350 μl of RLT buffer (w/10 μl/mL beta-mercapto-ethanol, RNeasy kit). Total RNA was isolated using the RNeasy Mini Kit from Qiagen according to the manufacturer's instructions. The concentration of the resulting total RNA was determined using Nanodrop and diluted with water to a final concentration of 25 ng/μL.

[2142] Endpoint PCR: 20 μL endpoint RT-PCRs were set up in 96-well plates using the AgPath-ID One-Step RT-PCR Reagents (Applied Biosystems) according to the manufacturer. Each reaction contained 200 nM forward primer, 200 nM reverse primer, and 50 ng total RNA. The following RT-PCR protocol was used: reverse transcription at 48° C. for 15 min, denaturation at 95° C. for 10 min, 35 PCR cycles with denaturation at 95° C. for 30 sec, annealing at 58° C. for 30 sec, and elongation at 68° C. for 1 min, final hold at 4° C. 10 μL of each RT-PCR reactions were analyzed on 2% 48-well E-Gels (Invitrogen) (pre-run 1 min, run 14 min) and imaged using an BioRad Gel Doc EZ Imager. The following size markers were used: TrackIt 1 Kb Plus DNA ladder and TrackIt 100 bp DNA ladder (10 μL/well, both Invitrogen).

[2143] Results: Oligonucleotides corresponding to exons that flank the intron where an iExon is located were used to amplify total RNA purified from untreated (DMSO) or cells treated with Compound 774 (at dose levels 10 nM, 1 μM or 10 μM). The resulting products were run on an agarose gel and the resulting bands of interest are demarcated by arrowheads, as shown in FIGS. 2A-D and 3-6A. In all cases, the increase of compound concentration results in appearance of a slower migrating PCR product containing the intronic-derived exon. In all cases, additional bands seen are intermediate spliced products.

[2144] Endpoint RT-PCR: Analysis of alternatively spliced mRNAs in cultured cells

[2145] GM03813 cells (Coriell Institute) derived from a patient with SMA type I (Coriell Institute) were plated at 5,000 cells/well in 200 μL DMEM with 10% FBS in 96-well plates, and incubated for 6 hours in a cell culture incubator (37° C., 5% CO₂, 100% relative humidity). Cells were then treated with certain representative compounds (e.g., Compound 774, Compound 702 and Compound 170) at different concentrations (in 0.5% DMSO) in duplicate for 24 hours. After removal of the supernatant, cells were lysed in Cells-To-Ct lysis buffer (Life Technologies, Inc.). Reverse transcription was performed using 5 μL of cell lysate and the iScript RT enzyme kit (Bio-Rad Laboratories, Inc). PCR was performed using 5 &L of cDNA and Platinum Taq HMFi DNA Polymerase (Life Technologies, Inc.) under the following PCR conditions: Step1: 94° C. (2 min), Step 2: 94° C. (30 sec), Step 3: 55° C. (30 sec), Step 4: 68° C. (1 min), then repeat Steps 2 to 4 for 33 cycles, then hold at 4° C. Alternatively spliced mRNAs were identified using primers listed in Tables 8 and 9. PCR products were separated on 2% agarose E-gels, stained with ethidium bromide and visualized using a gel imager (UVP). Results for genes affected by intronic exons generated by treatment with Compound 774 are shown in Table 10.

TABLE 8

| | | | SEQ ID |
|---|---|---|---|
| Gene | Forward Primer | Sequence 5′-3′ | NO. |
| ABCB8 | ABCB_54-73 | GCCGGCGGCTCCTGTTTTAC | 3629 |
| ANXA11 | ANXA_101-120 | AGTCGCTGTACCACGACATC | 3630 |
| ARL15 | ARL1_87-106-1a-KE | GCTGCCGGATGTCTGATCTC | 3631 |
| DCAF17 | DECA_23-43-KE | TGCTGTACCTTGCAGTGTTCC | 3632 |
| DHFR | DHFR_5-24 | CCATGAATCACCCAGGCCAT | 3633 |
| FAIM | FAIM_197-217-KE | GTGAAACCTACCCCAGAGCCT | 3634 |
| GXYLT1 | GXYL_57-77 | GGAAGCAATTGCCAAGAAGCA | 3635 |
| HTT | HTT_E49_For | TGCCCAGTCATTTGCACCTT | 3636 |
| MADD | MADD_137-156-KE | TGCCACAGGAAAGGGTCCTA | 3637 |
| MEMO1 | MEMO_37-56 | TGGAGCTCTGAGTGAGTCAA | 3638 |
| OXCT1 | OXCT_55-75-KE | GGCCTGACAGTGGATGACGTA | 3639 |
| PAPD4 | PAPD_46-65-KE | CCCGGAGCAGTGATGGTGAT | 3640 |
| PDXDC1 | *PDXD_23-42 | TGTGCCGTGTACCCTGTAAC | 3641 |
| PMS1 | PMS1_104-127-KE | TCTCCTCATGAGCTTTGGTATCCT | 3642 |
| PPIP5K2 | PPIP_34-57-KE | TCAGTTGACCTATCTCCCTCATGG | 3643 |
| PPP1R26 | PPP1R26e3F1 | CGTGTGGGAACACTGGCTG | 3644 |
| PRPF31 | RPRF_50-69-KE | GCCAACCGTATGAGCTTCGG | 3645 |
| RARS2 | RARS_30-53-KE | TTGGACATTTGCGTTCTACCATCA | 3646 |
| TNS3 | TNS3_6-29-KE | CCAGGTGATAAACTTGTGATCGTG | 3647 |
| WNK1 | Wnk1_45-67 | GCTGGTGTTTTTAAGATGGGACG | 3648 |
| SF3B | SF3B_107-127-2a | GGCATCAGCTTTGCCATTCAT | 3649 |
| SF3B | SF3B_134-153-9a | TTGGACAGCCTCTCTCCCAT | 3650 |
| MEMO1 | MEMO_37-56 | TGGAGCTCTGAGTGAGTCAA | 3651 |
| DHFR | DHFR_5-24 | CCATGAATCACCCAGGCCAT | 3652 |
| GCFC2 | GCFC2e2F1 | GGAGAAAAAGAACTTTCATCAACAG | 3653 |
| FAM174A | FAM174Ae2F1 | CAGGATGATGAGGATGATGACAAc | 3654 |
| SOS2 | SOS2e19F1 | CTGAAAAAGAGTTTACAGATTATTTGTTC | 3655 |
| COPS7B | COPS7Be2F1 | CGGAGTGTATGTCTTTGGAGAACTT | 3656 |
| LMBRD2 | LMBRD2e16R1 | GGAATCTTCTCTATTGTGTCCATAACG | 3657 |
| ASAP1 | ASAP1e11F1 | TACCCCTTCTTTTCACTGCCAT | 3658 |
| PPP1R26 | PPP1R26e3F1 | CGTGTGGGAACACTGGCTG | 3659 |
| NT5C2 | NT5C2e12F1 | AAACCACTCTTTTTTGGAGAAGGC | 3660 |
| ELMO2 | ELMO2e2F1 | AGGTGTAGAAAGAGGTACATGGAGAA | 3661 |

TABLE 9

| | | | SEQ ID |
|---|---|---|---|
| Gene | Reverse Primer | Sequence 5'-3' | NO. |
| ABCB8 | ABCB_235-254 | AGGAGCTGCGGTAGCCATCA | 3662 |
| ANXA11 | ANXA_302-321 | GAGCCACCAGTCACTGTTCA | 3663 |
| ARL15 | ARL1_392-411-1a-KE | TGAGGCCTATGCAAACCAGG | 3664 |
| DCAF17 | DECA_168-190-KE | CCATGAGACAAGGTAGCATCTGT | 3665 |
| DHFR | DHFR_209-228 | TGCCTTTCTCCTCCTGGACA | 3666 |
| FAIM | FAIM_367-388-KE | AGCAACATCCCAAACAGCTACG | 3667 |
| GXYLT1 | GXYL_246-268 | AGGAACGGATGTTGTCATCTTCA | 3668 |
| HTT | HTT_E51_Rev | GGGTATTTGTCCTTCTTTCT | 3669 |
| MADD | MADD_288-309-KE | TCTCCTCTGTCTCACCAAGGTC | 3670 |
| MEMO1 | MEMO_218-239 | TCCCCCTGGGATTCATCATAGT | 3671 |
| OXCT1 | OXCT_236-256-KE | AATGAAAAACACGCAGCCTGG | 3672 |
| PAPD4 | PAPD_183-205-KE | AAGGTGAGTATATGCCGTGCTTC | 3673 |
| PDXDC1 | *PDXD_179-199 | CAAGCAACAGGGGCAGTCTTC | 3674 |
| PMS1 | PMS1_285-308-KE | ACATGAGAGCCATCTTGTGATCTG | 3675 |
| PPIP5K2 | PPIP_149-172-KE | TTCACCTCCCCATTTTAGAACCAA | 3676 |
| PPP1R26 | PPP1R26e4R1 | GCGATGCTTTATTTCTCTACCG | 3677 |
| PRPF31 | RPRF_218-237-KE | TCGTTTACCTGTGTCTGCCG | 3678 |
| RARS2 | RARS_251-270-KE | ATGCCCCAATCGCCAAGGTA | 3679 |
| TNS3 | TNS3_96-116-KE | CGGCTCCTTGTCCTTCAACAT | 3680 |
| WNK1 | Wnk1_187-207 | CTGAGGACTCTGAGGTGCTGG | 3681 |
| SF3B | SF3B_256-275-2a | GTACTTTGCCAGTGTTGGGG | 3682 |
| SF3B | SF3B_304-324-9a | ACTCTCAGAGATGATCGGGGT | 3683 |
| MEMO1 | MEMO_218-239 | TCCCCCTGGGATTCATCATAGT | 3684 |
| DHFR | DHFR_209-228 | TGCCTTTCTCCTCCTGGACA | 3685 |
| GCFC2 | GCFC2e3R1 | GAATAAAAGCTGCATCTGGGATC | 3686 |
| FAM174A | FAM174Ae3R1 | CAACATTGATATAGTGGCTTCTTATTC | 3687 |
| SOS2 | SOS2e20R1 | CTGAAGAAGCAGATACTGGTGGAG | 3688 |
| COPS7B | COPS7Be3R1 | GTATGTCCCATAGGCAAACAGGTT | 3689 |
| LMBRD2 | LMBRD2e15F1 | AAAGGCAAGAAGAAGGTGAAAATC | 3690 |
| ASAP1 | ASAP1e12R1 | GCTAACTGCACTCCGAGACTTAAT | 3691 |
| PPP1R26 | PPP1R26e4R1 | GCGATGCTTTATTTCTCTACCG | 3692 |
| NT5C2 | NT5C2e13R1 | TAGACGATACCATGCTGTAGGGG | 3693 |
| ELMO2 | ELMO 232-252 | TTGATAATGGATGCCAGGGGC | 3694 |

[2146] Results: The statistically significant value for the likelihood of iExon production (APSI) according to the Fisher's Exact Test (FET) for PNN and HDF cell lines treated with Compound 774 at 3 μM and Fold Decrease (FD) for certain genes tested, where NR represents “Not Reported,” is shown in Table 10.

[2147] The APSI for inclusion of an iExon and resulting modulated expression of RNA transcripts identified is represented by stars, where one star (*) represents ≤25% change in expression, where two stars (**) represent change in expression in a range from <26% to HD 50 change, where three stars (***) represent change in expression in a range from <51% to ≤75% change, and, where four stars (****) represent change in expression in a range from <75% to ≤100% change.

TABLE 10

| | | | FET | | | FET | |
|---|---|---|---|---|---|---|---|
| | Inclusion | ΔPSI | ΔPSI | FD | ΔPSI | ΔPSI | FD |
| Gene Symbol | Position | (PNN) | (PNN) | PNN | (HDF) | (HDF) | HDF |
| ABCB8 | i1 | ** | 9.42E−16 | NR | ** | 3.66E−09 | NR |
| ABCC3 | i30 | ** | 6.00E−07 | −0.25 | * | 1 | −1.03 |
| ADAM17 | i1 | ** | 7.83E−11 | VR | * | 4.87E−08 | NR |
| ADCY3 | i6 | * | 0.003 | NR | * | 0.656286 | NR |
| AGPAT4 | i1 | * | 1.13E−05 | NR | ** | 1.21E−06 | NR |
| ANKRA2 | i5 | * | 0.28 | −1.05 | * | 0.001 | 0.73 |
| ANXA11 | i16 | * | 9.07E−56 | NR | * | 2.24E−20 | NR |
| APIP | i1 | * | 2.52E−11 | NR | * | 1.42E−19 | NR |
| APPL2 | i1 | * | 4.28E−06 | NR | * | 0.47 | NR |
| ARHGAP1 | i1 | * | 0.34 | −0.11 | * | 0.01 | −1.02 |
| ARL15 | i4 | ** | 1.77E−08 | NR | * | 1.94E−05 | NR |
| ARL15 | i1 | **** | 1.20E−17 | NR | *** | 2.25E−18 | NR |
| ASAP1 | i12 | * | 0 | −0.79 | * | 0 | −1.40 |
| ASAP1 | i19 | * | 0 | −0.79 | * | 0 | −1.40 |
| ASAP1 | i19 | * | 0.0003 | −0.79 | * | 0.22 | −1.40 |
| ASAP1 | i12 | * | 0.004 | −0.79 | * | 1 | −1.40 |
| ASPH | i24 | * | 1 | NR | * | 0.19 | NR |
| ATAD2B | i27 | * | 0.51 | NR | * | 0.47 | NR |
| ATXN1 | i7 | * | 0.08 | NR | * | 1 | NR |
| BECN1 | i11 | * | 3.01E−18 | NR | * | 5.27E−06 | NR |
| BHMT2 | i2 | * | 0.05 | NR | * | 1 | NR |
| BICD1 | i5 | * | 2.64E−05 | NR | * | 0.06 | NR |
| BTN3A1 | i1 | * | 0.02 | NR | * | 0.0001 | NR |
| C11orf30 | i20 | *** | 3.45E−12 | −0.82 | *** | 3.57E−10 | −1.06 |
| C11orf73 | i2 | ** | 1.10E−47 | −1.44 | * | 2.53E−40 | 0.52 |
| C12orf4 | i1 | **** | 2.07E−43 | NR | **** | 1.91E−66 | NR |
| C14orf132 | i1 | * | 0.16 | NR | * | 0.04 | NR |
| C8orf44 | i1 | *** | 0.004 | NR | * | 1 | NR |
| C8orf44-SGK3 | i1 | *** | 1.17E−08 | NR | ** | 0.06 | NR |
| C8orf88 | i3 | * | 0.13 | NR | * | 4.31E−05 | NR |
| CASC3 | i3 | * | 0.04 | −0.48 | * | 0.08 | −1.14 |
| CASP7 | i2 | * | 0.001 | NR | * | 1.99E−06 | NR |
| CCDC122 | i6 | * | 0.29 | −1.07 | * | 1 | 0.41 |
| CDH13 | i7 | * | 0.0003 | −2.06 | * | 1.32E−05 | −0.76 |
| CECR7 | i3 | **** | 3.06E−07 | NR | **** | 0.14 | NR |
| CENPI | i19 | **** | 1.62E−50 | NR | *** | 1.78E−58 | NR |
| CEP112 | i24 | * | 0.11 | −0.96 | * | 0.02 | −0.62 |
| CEP192 | i13 | * | 0.03 | NR | * | 0.34 | NR |
| CHEK1 | i13 | ** | 3.38E−05 | NR | * | 0.0002 | NR |
| CMAHP | i6 | * | 1 | −1.59 | *** | 0.002 | −0.47 |
| CNRIP1 | i2 | * | 3.10E−22 | NR | * | 1.70E−42 | NR |
| CNRIP1 | i15 | * | 1.62E−17 | NR | * | 2.06E−34 | NR |
| COPS7B | i2 | * | 1.45E−22 | NR | * | 4.58E−14 | NR |
| CPSF4 | i2 | * | 0.009 | NR | * | 0.40 | NR |
| CRISPLD2 | i1 | *** | 0.009 | −0.25 | *** | 0.001 | −1.29 |
| CRYBG3 | i17 | * | 1 | −0.33 | * | 1 | −1.08 |
| CSNK1E | i3 | **** | 1.50E−07 | NR | *** | 0.004 | NR |
| CSNK1G1 | i2 | * | 0.004 | NR | * | 1 | NR |
| DCAF17 | i2 | * | 0.06 | NR | * | 1 | NR |
| DCAF17 | i6 | **** | 1.01E−17 | NR | ** | 9.85E−15 | NR |
| DCUN1D4 | i8 | * | 0.05 | −1.16 | * | 3.90E−17 | −0.01 |
| DDX42 | i8 | * | 9.24E−17 | −1.26 | * | 0.0002 | −1.62 |
| DENND1A | i10 | ** | 0.0005 | −2.20 | *** | 8.97E−07 | −2.09 |
| DENND5A | i3 | * | 0 | −2.48 | * | 0 | −2.09 |
| DENND5A | i8 | * | 0 | −2.48 | * | 0 | −2.09 |
| DGKA | i10 | * | 0.02 | NR | * | 0.22 | NR |
| DHFR | i5 | **** | 2.99E−06 | NR | *** | 0.0006 | NR |
| DHFR | i5 | **** | 5.92E−08 | NR | *** | 0.0004 | NR |
| DIAPH3 | i27 | * | 8.17E−12 | −2.51 | * | 4.97E−12 | −2.14 |
| DIAPH3 | i15 | ** | 8.33E−15 | −2.51 | * | 1.10E−08 | −2.14 |
| DNAJC13 | i43 | * | 0.05 | −0.23 | * | 0.33 | −1.05 |
| DNMBP | i1 | * | 0.66 | −0.32 | * | 0.62 | −0.99 |
| DNMBP | i11 | * | 0.001 | −0.32 | * | 0.11 | −0.99 |
| DOCK1 | i23 | * | 2.18E−13 | −1.29 | * | 0.0006 | −1.28 |
| DYRK1A | i3 | * | 0.01 | NR | * | 0.33 | NR |
| EIF2B3 | i6 | * | 0.0005 | −1.86 | * | 1.49E−06 | −0.82 |
| ENAH | i1 | ** | 9.79E−34 | NR | ** | 7.69E−23 | NR |
| ENOX1 | i5 | * | 0 | −1.28 | * | 0 | −0.68 |
| EP300 | i1 | * | 0.0006 | 0.13 | * | 1 | −1.19 |
| ERC1 | i18 | ** | 4.96E−20 | −0.53 | * | 0.0002 | −1.49 |
| ERLIN2 | i1 | * | 4.62E−06 | NR | * | 0.12 | NR |
| ERRFI1 | i1 | **** | 0.004 | NR | * | 1 | NR |
| EVC | i5 | * | 1.62E−12 | −0.53 | * | 0.23 | −0.96 |
| FAF1 | i14 | * | 0.21 | −1.32 | * | 0.009 | −0.83 |
| FAIM | i2 | * | 0.08 | NR | * | 0.30 | NR |
| FAM126A | i7 | * | 5.38E−10 | NR | * | 1.31E−05 | NR |
| FAM13A | i4 | * | 0.49 | NR | * | 0.04 | NR |
| FAM162A | i1 | **** | 2.03E−84 | NR | *** | 6.15E−83 | NR |
| FAM174A | i2 | * | 0.001 | NR | * | 0.0006 | NR |
| FBN2 | i5 | ** | 5.89E−26 | −0.69 | ** | 9.15E−22 | −1.75 |
| FER | i13 | ** | 0.02 | −1.81 | * | 0.001 | −1.26 |
| FHOD3 | i21 | * | 2.20E−06 | −0.60 | * | 2.48E−05 | −1.23 |
| FOCAD | i6 | * | 0.01 | NR | * | 1 | NR |
| GALC | i6 | *** | 2.48E−07 | −2.21 | *** | 2.31E−06 | −2.14 |
| GCFC2 | i11 | * | 1 | −1.34 | * | 0.18 | −0.27 |
| GGACT | i2 | * | 0.24 | NR | * | 0.49 | NR |
| GLCE | i2 | * | 0.01 | NR | * | 0.01 | NR |
| GOLGA4 | i1 | * | 1 | −0.24 | * | 0.31 | −0.98 |
| GOLGB1 | i14 | * | 1 | −1.32 | * | 1.24E−05 | −1.24 |
| GPSM2 | i1 | ** | 0.0004 | NR | * | 0.14 | NR |
| GULP1 | i1 | *** | 0.001 | NR | ** | 0.0006 | NR |
| GXYLT1 | i7 | * | 4.54E−05 | NR | * | 0.02 | NR |
| HDX | i1 | **** | 1.66E−05 | NR | *** | 1.11E−05 | NR |
| HLTF | i14 | * | 1 | −1.76 | * | 0.19 | −1.75 |
| HMGA2 | i3 | * | 2.99E−06 | NR | * | 0.003 | NR |
| HNMT | i1 | * | 0.03 | NR | * | 0.89 | NR |
| HSD17B12 | i6 | *** | 3.41E−16 | −2.92 | ** | 1.16E−39 | −2.39 |
| HSD17B4 | i2 | * | 5.71E−06 | NR | * | 0.002 | NR |
| HTT | i49 | ** | 6.23E−08 | −1.21 | *** | 2.98E−05 | −1.86 |
| IFT57 | i5 | * | 2.26E−15 | NR | * | 1.31E−18 | NR |
| IVD | i7 | * | 6.58E−13 | NR | * | 4.50E−12 | NR |
| KDM6A | i26 | ** | 4.61E−14 | NR | ** | 1.87E−11 | NR |
| KIAA1524 | i11 | * | 0 | −1.43 | * | 0 | −0.62 |
| KIAA1715 | i6 | * | 0 | −1.41 | * | 0 | 0.05 |
| LETM2 | i8 | ** | 5.73E−05 | NR | * | 1 | NR |
| LOC400927 | i3 | **** | 1.50E−07 | NR | * | 0.004 | NR |
| LRRC42 | i2 | ** | 8.25E−09 | NR | * | 0.01 | NR |
| LUC7L3 | i1 | * | 4.59E−06 | NR | * | 0.003 | NR |
| LYRM1 | i2 | * | 3.63E−06 | NR | * | 4.98E−14 | NR |
| MB21D2 | i | * | 0.007 | NR | * | 0.002 | NR |
| MCM10 | i15 | * | 0.0009 | NR | * | 1 | NR |
| MED13L | i3 | * | 1 | −0.17 | * | 1 | −1.11 |
| MED13L | i22 | * | 0.07 | −0.17 | * | 1 | −1.11 |
| MEDAG | i2 | ** | 0.0004 | −2.40 | * | 0.01 | −1.60 |
| MEMO1 | i6 | ** | 2.42E−35 | −1.30 | * | 5.11E−40 | −0.56 |
| MFN2 | i1 | **** | 1.08E−90 | NR | *** | 8.82E−42 | NR |
| MMS19 | i2 | * | 0 | −1.36 | * | 0 | −1.75 |
| MRPL45 | i4 | * | 4.39E−11 | NR | * | 1.75E−10 | NR |
| MRPS28 | i2 | * | 1.43E−09 | NR | * | 0.003 | NR |
| MTERF3 | i3 | * | 1.38E−07 | −1.63 | * | 1.74E−18 | −0.19 |
| MYCBP2 | i80 | * | 2.71E−06 | −0.36 | * | 0.04 | −1.12 |
| MYCBP2 | i55 | *** | 1.44E−05 | −0.36 | ** | 0.03 | −1.12 |
| MYLK | i5 | * | 5.54E−09 | 0.23 | * | 3.75E−06 | −1.10 |
| MYOF | i29 | * | 0.01 | −0.82 | * | 0.003 | −1.75 |
| NGF | i1 | **** | 1.75E−69 | NR | *** | 2.47E−53 | NR |
| NREP | i3 | * | 0.0002 | −1.31 | * | 0.46 | −0.10 |
| NSUN4 | i5 | ** | 1.90E−09 | −1.48 | * | 1.80E−08 | −0.67 |
| NT5C2 | i11 | * | 2.32E−11 | −1.26 | * | 4.54E−07 | −0.05 |
| OSMR | i3 | * | 0.004 | −0.14 | * | 0.03 | −0.97 |
| OXCT1 | i16 | * | 0.0005 | NR | * | 0.46 | NR |
| PAPD4 | i7 | **** | 2.37E−32 | −2.33 | **** | 3.72E−52 | −1.40 |
| PCM1 | i15 | * | 0.06 | −1.30 | * | 0.10 | −0.86 |
| PDE7A | i2 | *** | 1.46E−10 | NR | *** | 3.25E−09 | NR |
| PDS5B | i13 | * | 0.03 | −0.42 | * | 0.03 | −1.02 |
| PDXDC1 | i7 | *** | 1.09E−13 | NR | *** | 4.13E−18 | NR |
| PIGN | i22 | ** | 1.35E−20 | NR | * | 1.27E−26 | NR |
| PIK3CD | i3 | ** | 3.02E−06 | NR | * | 0.32 | NR |
| PIK3R1 | i2 | * | 0.02 | −0.83 | ** | 6.81E−10 | −1.06 |
| PIKFYVE | i12 | * | 0.02 | NR | * | 0.002 | NR |
| PITPNB | i7 | * | 1 | −1.45 | * | 0.03 | −1.17 |
| PITPNB | i7 | * | 4.52E−05 | −1.45 | * | 2.70E−07 | −1.17 |
| PLEKHA1 | i1 | ** | 0.006 | NR | ** | 0.002 | NR |
| PLSCR1 | i1 | * | 0.0008 | NR | * | 1 | NR |
| PMS1 | i5 | **** | 1.49E−07 | −2.57 | *** | 3.56E−24 | −1.02 |
| POMT2 | i13 | **** | 2.02E−40 | NR | **** | 5.83E−53 | NR |
| PPARG | i4 | * | 0.04 | NR | * | 1 | NR |
| PPIP5K2 | i13 | * | 4.52E−11 | NR | * | 1.70E−05 | NR |
| PPP1R26 | i3 | ** | 3.54E−09 | NR | * | 0.0007 | NR |
| PRPF31 | i11 | ** | 2.66E−39 | NR | * | 8.15E−18 | NR |
| PRSS23 | i3 | * | 9.82E−07 | NR | * | 0.10 | NR |
| PSMA4 | i4 | * | 1.45E−09 | NR | * | 1.80E−20 | NR |
| PXK | i1 | * | 8.38E−05 | NR | * | 2.07E−06 | NR |
| RAF1 | i7 | * | 4.10E−37 | NR | * | 3.85E−24 | NR |
| RAPGEF1 | i11 | *** | 1.30E−07 | NR | **** | 5.56E−05 | NR |
| RARS2 | i6 | * | 2.50E−20 | NR | * | 5.90E−08 | NR |
| RBKS | i1 | ** | 0.0004 | NR | ** | 0.002 | NR |
| RERE | i13 | ** | 3.04E−07 | 0.02 | ** | 3.70E−05 | −1.06 |
| RFWD2 | i11 | * | 1.50E−13 | −2.40 | * | 3.95E−16 | −0.90 |
| RPA1 | i1 | * | 3.28E−12 | NR | * | 0.006 | NR |
| RPS10 | i5 | * | 9.72E−28 | NR | * | 3.15E−20 | NR |
| SAMD4A | i1 | * | 0.003 | NR | * | 0.001 | NR |
| SAR1A | i1 | * | 1.85E−48 | NR | * | 8.33E−65 | NR |
| SCO1 | i4 | * | 5.88E−07 | NR | * | 6.67E−08 | NR |
| SEC24A | i7 | * | 0.003 | NR | * | 0.008 | NR |
| SENP6 | i2 | **** | 5.51E−84 | NR | **** | 3.10E−77 | NR |
| SERGEF | i1 | **** | 0.14 | −1.02 | * | 1 | −0.81 |
| SGK3 | i1 | *** | 1.17E−08 | NR | ** | 0.06 | NR |
| SLC12A2 | i10 | *** | 7.56E−18 | NR | * | 0.0008 | NR |
| SLC25A17 | i2 | *** | 7.32E−38 | NR | *** | 3.49E−74 | NR |
| SLC44A2 | i21 | * | 1.56E−06 | 0.06 | * | 0.002 | −0.99 |
| SMYD3 | i5 | * | 0.0001 | −1.40 | * | 9.36E−06 | 0.33 |
| SNAP23 | i3 | **** | 6.29E−112 | −2.82 | *** | 1.22E−150 | −0.89 |
| SNHG16 | i1 | * | 1.92E−18 | −1.68 | * | 5.75E−14 | −0.99 |
| SNX7 | i7 | * | 3.44E−26 | NR | * | 8.14E−24 | NR |
| SOS2 | i19 | ** | 1.39E−10 | NR | * | 2.76E−05 | NR |
| SPATA5 | i10 | * | 1 | NR | * | 0.27 | NR |
| SPIDR | i1 | * | 3.23E−08 | NR | * | 0.007 | NR |
| SPRYD7 | i4 | * | 2.80E−05 | NR | * | 7.62E−07 | NR |
| SRGAP1 | i1 | * | 0.001 | −0.16 | * | 0.0002 | −0.99 |
| SRRM1 | i3 | * | 1 | 0.14 | * | 1 | −1.05 |
| STAT1 | i21 | * | 7.01E−09 | −3.06 | * | 7.52E−31 | −1.86 |
| STXBP6 | i2 | * | 9.26E−08 | NR | * | 1 | NR |
| STXBP6 | i1 | **** | 6.15E−14 | NR | *** | 2.75E−05 | NR |
| SUPT20H | i24 | * | 5.05E−07 | NR | * | 0.22 | NR |
| TAF2 | i20 | * | 0 | −1.03 | * | 0 | −0.57 |
| TAF2 | i23 | *** | 6.92E−18 | −1.02754 | ** | 3.95E−12 | −0.57 |
| TASP1 | i13 | *** | 7.02E−08 | NR | ** | 6.32E−05 | NR |
| TBC1D15 | i5 | * | 0.12 | NR | * | 1 | NR |
| TCF12 | i3 | * | 1.21E−22 | NR | * | 3.63E−15 | NR |
| TCF4 | i4 | * | 3.51E−22 | NR | * | 7.89E−07 | NR |
| TIAM1 | i4 | *** | 0.05 | NR | * | 1 | NR |
| TJP2 | i1 | * | 0.02 | NR | * | 0.25 | NR |
| TMC3 | i2 | ** | 0.18 | NR | * | 0.45 | NR |
| TMEM214 | i8 | * | 1.97E−56 | NR | * | 4.75E−07 | NR |
| TNRC6A | i4 | *** | 1.38E−21 | NR | * | 1.08E−10 | NR |
| TNS3 | i23 | ** | 0.0007 | −2.76 | * | 0.007 | −2.74 |
| TOE1 | i4 | * | 3.34E−05 | NR | * | 0.002 | NR |
| TRAF3 | i8 | * | 0.0004 | −0.54 | * | 0.14 | −0.97 |
| TSPAN2 | i4 | *** | 1.12E−18 | −1.06 | ** | 1.81E−08 | −0.58 |
| TTC7B | i5 | * | 3.09E−06 | NR | * | 8.95E−05 | NR |
| TYW5 | i1 | * | 0.0009 | NR | * | 0.10 | NR |
| UBAP2L | i24 | ** | 5.24E−52 | NR | * | 1.43E−35 | NR |
| URGCP | i1 | * | 0.15 | NR | * | 0.32 | NR |
| VAV2 | i4 | ** | 2.55E−08 | NR | ** | 1.65E−07 | NR |
| WDR27 | i2 | ** | 0.003 | NR | * | 1 | NR |
| WDR27 | i9 | ** | 0.008 | NR | ** | 0.09 | NR |
| WDR37 | i9 | ** | 0.0009 | NR | ** | 0.03 | NR |
| WDR91 | i5 | *** | 7.69E−06 | NR | ** | 0.0006 | NR |
| WNK1 | i23 | * | 0.01 | 0.071985 | * | 1 | −1.26 |
| XRN2 | i3 | * | 1 | −1.29088 | * | 1 | −0.55 |
| XRN2 | i16 | * | 3.25E−07 | −1.29088 | * | 1.05E−08 | −0.55 |
| ZCCHC8 | i11 | * | 5.24E−10 | NR | * | 4.65E−08 | NR |
| ZFP82 | i4 | ** | 9.95E−06 | NR | ** | 1.56E−08 | NR |
| ZNF138 | i3 | *** | 0.025 | NR | * | 0.07 | NR |
| ZNF232 | i4 | * | 0.23 | NR | * | 0.02 | NR |
| ZNF37BP | i4 | **** | 0.003 | NR | *** | 0.03 | NR |

[2148] Results: The statistically significant value for the likelihood of exon inclusion (APSI) according to the Fisher's Exact Test (FET) for PNN and HDF cell lines treated with Compound 774 at 3 μM and Fold Decrease (FD) for certain genes tested, where NR represents “Not Reported,” is shown in Table 10a.

[2149] The APSI for inclusion of an exon and resulting modulated expression of RNA transcripts identified is represented by stars, where one star (*) represents ≤25% change in expression, where two stars (**) represent change in expression in a range from <26% to ≤50% change, where three stars (***) represent change in expression in a range from <51% to ≤75% change, and, where four stars (****) represent change in expression in a range from <75% to ≤100% change.

TABLE 10a

| | | | FET | | | FET | |
|---|---|---|---|---|---|---|---|
| | Inclusion | ΔPSI | ΔPSI | FD | ΔPSI | ΔPSI | FD |
| Gene Symbol | Position | (PNN) | (PNN) | PNN | (HDF) | (HDF) | HDF |
| APLP2 | e7 | ** | 0 | NR | ** | 2.69E−271 | NR |
| AXIN1 | e9 | ** | 0.004 | NR | * | 1 | NR |
| CECR7 | e5 | * | 0.02 | NR | * | 1 | NR |
| DAGLB | c4 | * | 0.74 | NR | * | 0.43 | NR |
| DLGAP4 | e8 | * | 1.12E−13 | NR | * | 1.12E−07 | NR |
| ERCC1 | e8 | * | 0.0009 | NR | * | 0.20 | NR |
| ERGIC3 | e8 | * | 1.44E−220 | NR | * | 2.39E−209 | NR |
| FAM198B | e3 | * | 0.003 | −1.81 | * | 0.20 | −0.35 |
| GGCT | e2 | ** | 1.36E−30 | NR | ** | 5.86E−45 | NR |
| HAT1 | e3 | * | 6.50E−11 | NR | * | 1.34E−10 | NR |
| HPS1 | e5 | * | 0.01 | NR | * | 0.34 | NR |
| INPP5K | e2 | * | 0.53 | NR | * | 0.14 | NR |
| MADD | e21 | * | 2.28E−08 | NR | * | 7.00E−07 | NR |
| PPHLN1 | e3 | *** | 8.22E−83 | NR | ** | 8.90E−66 | NR |
| PRUNE2 | e18 | * | 0.52 | −0.52 | ** | 0.05 | −1.74 |
| RAP1A | e2 | * | 3.80E−15 | NR | * | 4.27E−07 | NR |
| RNFT1 | e3 | * | 0.02 | NR | * | 6.02E−07 | NR |
| RPS6KB2 | e2 | * | 0.14 | NR | * | 1 | NR |
| SH3YL1 | e9 | * | 0.009 | NR | * | 0.08 | NR |
| SKA2 | e3 | * | 0.0001 | NR | * | 0.05 | NR |
| SPATA18 | e4 | ** | 1.50E−05 | NR | * | 0.29 | NR |
| STRN3 | e8 | **** | 4.13E−54 | NR | *** | 4.39E−44 | NR |
| TMEM189- | e6 | * | 2.19E−30 | NR | * | 4.66E−20 | NR |
| UBE2V1 | | | | | | | |
| TRIM65 | e5 | *** | 2.49E−11 | NR | ** | 0.0002 | NR |
| TUBE1 | e4 | * | 7.36E−05 | NR | * | 2.05E−10 | NR |
| UBE2V1 | e3 | * | 2.19E−30 | NR | * | 4.66E−20 | NR |
| VPS29 | e2 | ** | 3.05E−17 | NR | ** | 2.61E−38 | NR |
| ZNF680 | e3 | * | 0.13 | NR | * | 0.32 | NR |

[2150] Details on the location of the iExon produced in affected genes from Table 10 are shown in Table 11.

TABLE 11

| Gene Symbol | Ref SeqID | Coordinates | Description |
|---|---|---|---|
| ABCB8 | NM_007188 | chr7: 150728328- | ATP-binding cassette, sub-family B |
| | | 150728378 | (MDR/TAP), member 8 |
| ABCC3 | NM_003786 | chr17: 48767318- | ATP-binding cassette, sub-family C |
| | | 48767437 | (CFTR/MRP), member 3 |
| ADAM17 | NM_003183 | chr2: 9683889- | ADAM metallopeptidase domain 17 |
| | | 9683825 | |
| ADCY3 | NM_004036 | chr2: 25061781- | adenylate cyclase 3 |
| | | 25061716 | |
| AGPAT4 | NM_020133 | chr6: 161687802- | 1-acylglycerol-3-phosphate O-acyltransferase 4 |
| | | 161687740 | |
| ANKRA2 | NM_023039 | chr5: 72851082- | ankyrin repeat, family A (RFXANK-like), 2 |
| | | 72850950 | |
| ANXA11 | NM_001278407 | chr10: 81916254- | annexin A11 |
| | | 81916134 | |
| APIP | NM_015957 | chr11: 34933660- | APAF1 interacting protein |
| | | 34933520 | |
| APLP2 | NM_001642 | chr11: 129993507- | amyloid beta (A4) precursor-like protein 2 |
| | | 129993674 | |
| APPL2 | NM_018171 | chr12: 105625422- | adaptor protein, phosphotyrosine interaction, PH |
| | | 105625147 | domain and leucine zipper containing 2 |
| ARHGAP1 | NM_004308 | chr11: 46718619- | Rho GTPasc activating protein 1 |
| | | 46718571 | |
| ARL15 | NM_019087 | chr5: 53212951- | ADP-ribosylation factor-like 15 |
| | | 53212826 | |
| ASAP1 | NM_001247996 | chr8: 131173039- | ArfGAP with SH3 domain, ankyrin repeat and |
| | | 131173031 | PH domain 1 |
| ASAP1 | NM_001247996 | chr8: 131135828- | ArfGAP with SH3 domain, ankyrin repeat and |
| | | 131135650 | PH domain 1 |
| ASAP1 | NM_001247996 | chr8: 131135731- | ArfGAP with SH3 domain, ankyrin repeat and |
| | | 131135650 | PH domain 1 |
| ASAP1 | NM_001247996 | chr8: 131173046- | ArfGAP with SH3 domain, ankyrin repeat and |
| | | 131173031 | PH domain 1 |
| ASPH | NM_004318 | chr8: 62,421,470- | aspartate beta-hydroxylase |
| | | 62,421,527 | |
| ATAD2B | NM_001242338 | chr2: 23976387- | ATPase family, AAA domain containing 2B |
| | | 23976214 | |
| ATXN1 | NM_000332 | chr6: 16409524- | ataxin 1 |
| | | 16409426 | |
| AXIN1 | NM_003502 | chr16: 341297- | axin 1 |
| | | 341190 | |
| BECN1 | NM_003766 | chr17: 40963348- | beclin 1, autophagy related |
| | | 40963310 | |
| BHMT2 | NM_017614 | chr5: 78374568- | betaine--homocysteine S-methyltransferase 2 |
| | | 78374655 | |
| BICD1 | NM_001714 | chr12: 32486172- | bicaudal D homolog 1 (Drosophila) |
| | | 32486263 | |
| BTN3A1 | NM_001145008 | chr6: 26404363- | butyrophilin, subfamily 3, member Al |
| | | 26404455 | |
| C11orf30 | NM_020193 | chr11: 76259972- | chromosome 11 open reading frame 30 |
| | | 76260061 | |
| C11orf73 | NR 024596 | chr11: 86037555- | chromosome 11 open reading frame 73 |
| | | 86037718 | |
| C12orf4 | NM_020374 | chr12: 4646680- | chromosome 12 open reading framc 4 |
| | | 4646546 | |
| C14orf132 | NM_001252507 | chr14: 96506612- | chromosome 14 open reading frame 132 |
| | | 96506704 | |
| C8orf44 | NM_019607 | chr8: 67588980- | chromosome 8 open reading frame 44 |
| | | 67589137 | |
| C8orf44-SGK3 | NM_001204173 | chr8: 67697924- | C8orf44-SGK3 readthrough |
| | | 67698031 | |
| C8orf88 | NM_001190972 | chr8: 91990874- | chromosome 8 open reading frame 88 |
| | | 91990807 | |
| CASC3 | NM_007359 | chr17: 38298307- | cancer susceptibility candidate 3 |
| | | 38298353 | |
| CASP7 | NM_033340 | chr10: 115477382- | caspase 7, apoptosis-related cysteine peptidase |
| | | 115477512 | |
| CCDC122 | NM_144974 | chr13: 44431087- | coiled-coil domain containing 122 |
| | | 44431054 | |
| CDH13 | NM_001220488 | chr16: 83402146- | cadherin 13 |
| | | 83402179 | |
| CECR7 | NM_014339 | chr22: 17,535,915- | cat eye syndrome chromosome region, candidate |
| | | 17,535,996 | 7 (non-protein coding) |
| CECR7 | NR 015352 | chr22: 17535855- | cat eye syndrome chromosome region, candidate |
| | | 17535996 | 7 (non-protein coding) |
| CENPI | NM_006733 | chrX: 100411511- | centromere protein I |
| | | 100411544 | |
| CEP112 | NM_001199165 | chr17: 63684725- | centrosomal protein 112kDa |
| | | 63684629 | |
| CEP192 | NM_032142 | chr18: 13038514- | centrosomal protein 192kDa |
| | | 13038578 | |
| CHEK1 | NM_001114121 | chr11: 125526101- | checkpoint kinase 1 |
| | | 125526230 | |
| CMAHP | NR 002174 | chr6: 25107418- | cytidine monophospho-N-acetylneuraminic acid |
| | | 25107336 | hydroxylase, pseudogene |
| CNRIP1 | NM_001111101 | chr2: 68542975- | cannabinoid receptor interacting protein 1 |
| | | 68542840 | |
| CNRIP1 | NM_000945 | chr2: 68,542,833- | cannabinoid receptor interacting protein 1 |
| | | 68,542,986 | |
| COPS7B | NM_001282950 | chr2: 232655806- | COP9 signalosome subunit 7B |
| | | 232655883 | |
| CPSF4 | NM_006693 | chr7: 99045396- | cleavage and polyadenylation specific factor 4, |
| | | 99045536 | 30kDa |
| CRISPLD2 | NM_031476 | chr16: 84869783- | cysteine-rich secretory protein LCCL domain |
| | | 84870041 | containing 2 |
| CRYBG3 | NM_153605 | chr3: 97635177- | beta-gamma crystallin domain containing 3 |
| | | 97635237 | |
| CSNK1E | NM_001289912 | chr22: 38766050- | casein kinase 1, epsilon |
| | | 38765991 | |
| CSNK1G1 | NM_022048 | chr15: 64575350- | casein kinase 1, gamma 1 |
| | | 64575317 | |
| DAGLB | NM_139179 | chr7: 6474651- | diacylglycerol lipasc, beta |
| | | 6474425 | |
| DCAF17 | NM_025000 | chr2: 172298369- | DDB1 and CUL4 associated factor 17 |
| | | 172298546 | |
| DCAF17 | NM_025000 | chr2: 172309926- | DDB1 and CUL4 associated factor 17 |
| | | 172309987 | |
| DCUN1D4 | NM_001040402 | chr4: 52775086- | DCN1, defective in cullin neddylation 1, |
| | | 52775141 | domain containing 4 |
| DDX42 | NM_007372 | chr17: 61883354- | DEAD (Asp-Glu-Ala-Asp) box helicase 42 |
| | | 61883511 | |
| DENND1A | NM_020946 | chr9: 126385380- | DENN/MADD domain containing 1A |
| | | 126385322 | |
| DENND5A | NM_015213 | chr11: 9227781- | DENN/MADD domain containing 5A |
| | | 9227736 | |
| DENND5A | NM_015213 | chr11: 9198449- | DENN/MADD domain containing 5A |
| | | 9198319 | |
| DGKA | NM_201445 | chr12: 56333603- | diacylglycerol kinasc, alpha 80kDa |
| | | 56333699 | |
| DHFR | NM_000791 | chr5: 79929807- | dihydrofolate reductase |
| | | 79929696 | |
| DHFR | NM_000791 | chr5: 79928121- | dihydrofolate reductase |
| | | 79928051 | |
| DIAPH3 | NM_001042517 | chr13: 60266972- | diaphanous-related formin 3 |
| | | 60266851 | |
| DIAPH3 | NM_001042517 | chr13: 60548266- | diaphanous-related formin 3 |
| | | 60548219 | |
| DLGAP4 | NM_014902 | chr20: 35127645- | discs, large (Drosophila) homolog-associated |
| | | 35127724 | protein 4 |
| DNAJC13 | NM_015268 | chr3: 132227720- | DnaJ (Hsp40) homolog, subfamily C, member |
| | | 132227883 | 13 |
| DNM_BP | NM_015221 | chr10: 101762780- | dynamin binding protein |
| | | 101762699 | |
| DNM_BP | NM_015221 | chr10: 101654399- | dynamin binding protein |
| | | 101654318 | |
| DOCK1 | NM_001380 | chr10: 128901890- | dedicator of cytokinesis 1 |
| | | 128901944 | |
| DYRK1A | NM_101395 | chr21: 38794884- | dual-specificity tyrosine-(Y)-phosphorylation |
| | | 38794954 | regulated kinase 1A |
| EIF2B3 | NM_020365 | chr1: 45350395- | eukaryotic translation initiation factor 2B, |
| | | 45350311 | subunit 3 gamma, 58kDa |
| ENAH | NM_001008493 | chr1: 225788060- | enabled homolog (Drosophila) |
| | | 225787910 | |
| ENOX1 | NM_017993 | chr13: 43,984,307- | ecto-NOX disulfide-thiol exchanger 1 |
| | | 43,984,398 | |
| EP300 | NM_001429 | chr22: 41496302- | E1A binding protein p300 |
| | | 41496407 | |
| ERC1 | NR 027948 | chr12: 1536281- | ELKS/RAB6-interacting/CAST family member |
| | | 1536343 | 1 |
| ERCC1 | NM_001983 | chr19: 45917292- | excision repair cross-complementation group 1 |
| | | 45917221 | |
| ERGIC3 | NM_198398 | chr20: 34142143- | ERGIC and golgi 3 |
| | | 34142157 | |
| ERLIN2 | NM_007175 | chr8: 37594849- | ER lipid raft associated 2 |
| | | 37594946 | |
| ERRFI1 | NM_018948 | chr1: 8,080,640- | ERBB receptor feedback inhibitor 1 |
| | | 8,080,926 | |
| EVC | NM_153717 | chr4: 5743061- | Ellis van Creveld protein |
| | | 5743168 | |
| FAF1 | NM_007051 | chr1: 51003153- | Fas (TNFRSF6) associated factor 1 |
| | | 51003085 | |
| FAIM | NM_001033030 | chr3: 138335412- | Fas apoptotic inhibitory molecule |
| | | 138335506 | |
| FAM126A | NM_032581 | chr7: 23011932- | family with sequence similarity 126, member A |
| | | 23011871 | |
| FAM13A | NM_014883 | chr4: 89890343- | family with scquence similarity 13, member A |
| | | 89890310 | |
| FAM162A | NM_014367 | chr3: 122120223- | family with sequence similarity 162, member A |
| | | 122120382 | |
| FAM174A | NM_198507 | chr5: 99917051- | family with sequence similarity 174, member A |
| | | 99917108 | |
| FAM198B | NM_001031700 | chr4: 159091499- | family with sequence similarity 198, member B |
| | | 159091399 | |
| FBN2 | NM_001999 | chr5: 127850450- | fibrillin 2 |
| | | 127850370 | |
| FER | NM_005246 | chr5: 108321155- | fer (fps/fes related) tyrosine kinase |
| | | 108321188 | |
| FHOD3 | NM_001281740 | chr18: 34322340- | formin homology 2 domain containing 3 |
| | | 34322431 | |
| FOCAD | NM_017794 | chr9: 20737106- | focadhesin |
| | | 20737152 | |
| GALC | NM_001201402 | chr14: 88447791- | galactosylceramidase |
| | | 88447758 | |
| GCFC2 | NM_003203 | chr2: 75913102- | GC-rich sequence DNA-binding factor 2 |
| | | 75913000 | |
| GGACT | NM_001195087 | chr13: 101194723- | gamma-glutamylamine cyclotransferase |
| | | 101194628 | |
| GGCT | NM_001199815 | chr7: 30540297- | gamma-glutamylcyclotransferase |
| | | 30540152 | |
| GLCE | NM_015554 | chr15: 69517534- | glucuronic acid epimerase |
| | | 69517591 | |
| GOLGA4 | NM_002078 | chr3: 37285619- | golgin A4 |
| | | 37285734 | |
| GOLGB1 | NM_001256486 | chr3: 121401810- | golgin B1 |
| | | 121401764 | |
| GPSM2 | NM_013296 | chr1: 109420153- | G-protein signaling modulator 2 |
| | | 109420396 | |
| GULP1 | NM_001252668 | chr2: 189164835- | GULP, engulfment adaptor PTB domain |
| | | 189164866 | containing 1 |
| GXYLT1 | NM_173601 | chr12: 42489016- | glucoside xylosyltransferase 1 |
| | | 42488953 | |
| HAT1 | NM_003642 | chr2: 172803228- | histone acetyltransferase 1 |
| | | 172803303 | |
| HDX | NM_001177479 | chrX: 83756519- | highly divergent homeobox |
| | | 83756437 | |
| HLTF | NM_139048 | chr3: 148769931- | helicase-like transcription factor |
| | | 148769832 | |
| HMGA2 | NM_003483 | chr12: 66267911- | high mobility group AT-hook 2 |
| | | 66267926 | |
| HNM_T | NM_006895 | chr2: 138724667- | histamine N-methyltransferase |
| | | 138724956 | |
| HPS1 | NM_000195 | chr10: 100195171- | Hermansky-Pudlak syndrome 1 |
| | | 100195029 | |
| HSD17B12 | NM_016142 | chr11: 43838189- | hydroxystcroid (17-bcta) dchydrogenasc 12 |
| | | 43838222 | |
| HSD 17B4 | NM_001199291 | chr5: 118792986- | hydroxysteroid (17-beta) dehydrogenase 4 |
| | | 118793063 | |
| HTT | NM_002111 | chr4: 3215349- | huntingtin |
| | | 3215463 | |
| IFT57 | NM_018010 | chr3: 107911373- | intraflagellar transport 57 |
| | | 107911323 | |
| INPP5K | NM_001135642 | chr17: 1419412- | inositol polyphosphate-5-phosphatase K |
| | | 1419182 | |
| IVD | NM_002225 | chr15: 40706629- | isovaleryl-CoA dehydrogenase |
| | | 40706723 | |
| KDM6A | NM_021140 | chrX: 44965787- | lysine (K)-specific demethylase 6A |
| | | 44965894 | |
| KIAA1524 | NM_020890 | chr3: 108284925- | KIAA1524 |
| | | 108284745 | |
| KIAA1715 | NM_030650 | chr2: 176835145- | KIAA1715 |
| | | 176834927 | |
| LETM2 | NM_001286787 | chr8: 38262801- | leucine zipper-EF-hand containing |
| | | 38262912 | transmembrane protein 2 |
| LOC400927 | NR 002821 | chr22: 38766050- | TPTE and PTEN homologous inositol lipid |
| | | 38765991 | phosphatase pseudogene |
| LRRC42 | NM_001256409 | chr1: 54413535- | leucine rich repeat containing 42 |
| | | 54413654 | |
| LUC7L3 | NM_006107 | chr17: 48798190- | LUC7-like 3 pre-mRNA splicing factor |
| | | 48798241 | |
| LYRM1 | NM_001128301 | chr16: 20922505- | LYR motif containing 1 |
| | | 20922586 | |
| MADD | NM_003682 | chr11: 47314094- | MAP-kinase activating death domain |
| | | 47314147 | |
| MB21D2 | NM_178496 | chr3: 192555098- | Mab-21 domain containing 2 |
| | | 192555020 | |
| MCM10 | NM_182751 | chr10: 13239941- | minichromosome maintenance complex |
| | | 13240039 | component 10 |
| MED13L | NM_015335 | chr12: 116547674- | mediator complex subunit 13-like |
| | | 116547579 | |
| MED13L | NM_015335 | chr12: 116419435- | mediator complex subunit 13-like |
| | | 116419344 | |
| MEDAG | NM_032849 | chr13: 31492953- | mesenteric estrogen-dependent adipogenesis |
| | | 31493127 | |
| MEMO1 | NM_015955 | chr2: 32112156- | Methylation modifier for class I HLA |
| | | 32112104 | |
| MFN2 | NM_014874 | chr1: 12041867- | mitofusin 2 |
| | | 12041910 | |
| MMS19 | NM_022362 | chr10: 99241240- | MMS19 homolog, cytosolic iron-sulfur |
| | | 99241106 | assembly component |
| MRPL45 | NM_032351 | chr17: 36468550- | mitochondrial ribosomal protein L45 |
| | | 36468624 | |
| MRPS28 | NM_014018 | chr8: 80915355- | mitochondrial ribosomal protein S28 |
| | | 80915234 | |
| MTERF3 | NM_001286643 | chr8: 97263851- | mitochondrial transcription termination factor 3 |
| | | 97263810 | |
| MYCBP2 | NM_015057 | chr13: 77628142- | MYC binding protein 2, E3 ubiquitin protein |
| | | 77628054 | ligase |
| MYCBP2 | NM_015057 | chr13: 77692630- | MYC binding protein 2, E3 ubiquitin protein |
| | | 77692475 | ligase |
| MYLK | NM_053025 | chr3: 123459382- | myosin light chain kinase |
| | | 123459323 | |
| MYOF | NM_013451 | chr10: 95117679- | myoferlin |
| | | 95117562 | |
| NGF | NM_002506 | chr1: 115843104- | nerve growth factor (beta polypeptide) |
| | | 115843018 | |
| NREP | NM_001142476 | chr5: 111086122- | neuronal regeneration related protein |
| | | 111086049 | |
| NSUN4 | NR 045789 | chr1: 46823248- | NOP2/Sun domain family, member 4 |
| | | 46823331 | |
| NT5C2 | NM_012229 | chr10: 104853974- | 5′-nucleotidase, cytosolic II |
| | | 104853926 | |
| OSMR | NM_003999 | chr5: 38876877- | oncostatin M receptor |
| | | 38876923 | |
| OXCT1 | NM_000436 | chr5: 41734751- | 3-oxoacid CoA transferase 1 |
| | | 41734677 | |
| PAPD4 | NM_173797 | chr5: 78937278- | PAP associated domain containing 4 |
| | | 78937340 | |
| PCM1 | NM_006197 | chr8: 17818551- | pericentriolar material 1 |
| | | 17818653 | |
| PDE7A | NM_001242318 | chr8: 66693182- | phosphodiesterase 7A |
| | | 66693079 | |
| PDS5B | NM_015032 | chr13: 33263018- | PDS5 cohesin associated factor B |
| | | 33263158 | |
| PDXDC1 | NM_001285447 | chr16: 15103356- | pyridoxal-dependent decarboxylase domain |
| | | 15103418 | containing 1 |
| PIGN | NM_176787 | chr18: 59764997- | phosphatidylinositol glycan anchor biosynthesis, |
| | | 59764914 | class N |
| PIK3CD | NM_005026 | chr1: 9774095- | phosphatidylinositol-4,5-bisphosphate 3-kinase, |
| | | 9774189 | catalytic subunit delta |
| PIK3R1 | NM_181523 | chr5: 67538784- | phosphoinositide-3-kinase, regulatory subunit 1 |
| | | 67538973 | (alpha) |
| PIKFYVE | NM_015040 | chr2: 209176229- | phosphoinositide kinase, FYVE finger |
| | | 209176294 | containing |
| PITPNB | NM_012399 | chr22: 28288318- | phosphatidylinositol transfer protein, beta |
| | | 28288117 | |
| PITPNB | NM_012399 | chr22: 28290410- | phosphatidylinositol transfer protein, beta |
| | | 28290364 | |
| PLEKHA1 | NM_001195608 | chr10: 124148798- | pleckstrin homology domain containing, family |
| | | 124148900 | A (phosphoinositide binding specific) member 1 |
| PLSCR1 | NM_021105 | chr3: 146255831- | phospholipid scramblasc 1 |
| | | 146255783 | |
| PMS1 | NM_000534 | chr2: 190683464- | PMS1 homolog 1, mismatch repair system |
| | | 190683555 | component |
| POMT2 | NM_013382 | chr14: 77753614- | protein-O-mannosyltransferase 2 |
| | | 77753576 | |
| PPARG | NM_138712 | chr3: 12427535- | peroxisome proliferator-activated receptor |
| | | 12427591 | gamma |
| PPHLN1 | NM_016488 | chr12: 42745687- | periphilin 1 |
| | | 42745851 | |
| PPIP5K2 | NM_015216 | chr5: 102492916- | diphosphoinositol pentakisphosphate kinase 2 |
| | | 102492948 | |
| PPP1R26 | NM_014811 | chr9: 138376071- | protein phosphatase 1, regulatory subunit 26 |
| | | 138376135 | |
| PRPF31 | NM_015629 | chr19: 54632112- | pre-mRNA processing factor 31 |
| | | 54632180 | |
| PRSS23 | NR 120591 | chr11: 86651889- | protease, serine, 23 |
| | | 86652069 | |
| PRUNE2 | NM_015225 | chr9: 79234303- | prune homolog 2 (Drosophila) |
| | | 79234256 | |
| PSMA4 | NM_001102667 | chr15: 78834921- | proteasome subunit alpha 4 |
| | | 78834987 | |
| PXK | NM_017771 | chr3: 58321084- | PX domain containing serine/threonine kinase |
| | | 58321179 | |
| RAF1 | NM_002880 | chr3: 12645036- | Raf-1 proto-oncogene, serine/threonine kinase |
| | | 12644977 | |
| RAP1A | NM_001010935 | chr1: 112170092- | RAP1A, member of RAS oncogene family |
| | | 112170148 | |
| RAPGEF1 | NM_005312 | chr9: 134479440- | Rap guanine nucleotide exchange factor |
| | | 134479348 | (GEF) 1 |
| RARS2 | NM_020320 | chr6: 88257102- | arginyl-tRNA synthetase 2, mitochondrial |
| | | 88256965 | |
| RBKS | NM_001287580 | chr2: 28111807- | ribokinasc |
| | | 28111741 | |
| RERE | NM_012102 | chr1: 8456591- | arginine-glutamic acid dipeptide (RE) repeats |
| | | 8456504 | |
| RFWD2 | NM_022457 | chr1: 176044514- | ring finger and WD repeat domain 2, E3 |
| | | 176044399 | ubiquitin protein ligase |
| RNFT1 | NM_016125 | chr17: 58039977- | ring finger protein, transmembrane 1 |
| | | 58039901 | |
| RPA1 | NM_002945 | chr17: 1745069- | replication protein A1, 70kDa |
| | | 1745127 | |
| RPS10 | NM_001204091 | chr6: 34385627- | ribosomal protein S10 |
| | | 34385575 | |
| RPS6KB2 | NM_003952 | chr11: 67196453- | ribosomal protein S6 kinase, 70kDa, polypeptide |
| | | 67196493 | 2 |
| SAMD4A | NM_015589 | chr14: 55115465- | sterile alpha motif domain containing 4A |
| | | 55115566 | |
| SAR1A | NM_001142648 | chr10: 71926149- | secretion associated, Ras related GTPasc 1A |
| | | 71926032 | |
| SCO1 | NM_004589 | chr17: 10594966- | SCO1 cytochrome c oxidase assembly protein |
| | | 10594907 | |
| SEC24A | NM_021982 | chr5: 134013731- | SEC24 homolog A, COPII coat complex |
| | | 134013842 | component |
| SENP6 | NM_015571 | chr6: 76331643- | SUMO1/sentrin specific peptidase 6 |
| | | 76331687 | |
| SERGEF | NR 104040 | chr11: 18031686- | secretion regulating guanine nucleotide |
| | | 18031622 | exchange factor |
| SGK3 | NM_001033578 | chr8: 67697924- | serum/glucocorticoid regulated kinase family, |
| | | 67698031 | member 3 |
| SH3YL1 | NM_015677 | chr2: 224920- | SH3 and SYLF domain containing 1 |
| | | 224868 | |
| SKA2 | NM_182620 | chr17: 57196856- | spindle and kinetochore associated complex |
| | | 57196757 | subunit 2 |
| SLC12A2 | NM_001046 | chr5: 127478818- | solute carrier family 12 |
| | | 127478874 | (sodium/potassium/chloride transporter), |
| | | | member 2 |
| SLC25A17 | NM_006358 | chr22: 41193340- | solute carrier family 25 (mitochondrial carrier; |
| | | 41193288 | peroxisomal membrane protein, 34kDa), |
| | | | member 17 |
| SLC44A2 | NM_001145056 | chr19: 10753573- | solute carrier family 44 (choline transporter), |
| | | 10753697 | member 2 |
| SMYD3 | NM_001167740 | chr1: 246394576- | SET and MYND domain containing 3 |
| | | 246394501 | |
| SNAP23 | NM_003825 | chr15: 42805372- | synaptosomal-associated protein, 23kDa |
| | | 42805407 | |
| SNHG16 | NR 038109 | chr17: 74554456- | small nucleolar RNA host gene 16 |
| | | 74554545 | |
| SNX7 | NR 033716 | chr1: 99204216- | sorting nexin 7 |
| | | 99204359 | |
| SOS2 | NM_006939 | chr14: 50600608- | son of sevenless homolog 2 (Drosophila) |
| | | 50600526 | |
| SPATA18 | NM_145263 | chr4: 52928386- | spermatogenesis associated 18 |
| | | 52928498 | |
| SPATA5 | NM_145207 | chr4: 123901321- | spermatogenesis associated 5 |
| | | 123901384 | |
| SPIDR | NM_001080394 | chr8: 48185929- | scaffolding protein involved in DNA repair |
| | | 48186042 | |
| SPRYD7 | NM_020456 | chr13: 50492357- | SPRY domain containing 7 |
| | | 50492229 | |
| SRGAP1 | NM_020762 | chr12: 64319388- | SLIT-ROBO Rho GTPasc activating protein 1 |
| | | 64319457 | |
| SRRM1 | NM_005839 | chr1: 24973570- | serine/arginine repetitive matrix 1 |
| | | 24973640 | |
| STAT1 | NM_007315 | chr2: 191843332- | signal transducer and activator of |
| | | 191843254 | transcription 1, 91kDa |
| STRN3 | NM_001083893 | chr14: 31398517- | striatin, calmodulin binding protein 3 |
| | | 31398407 | |
| STXBP6 | NM_014178 | chr14: 25411028- | syntaxin binding protein 6 (amisyn) |
| | | 25410930 | |
| STXBP6 | NM_014178 | chr14: 25457178- | syntaxin binding protein 6 (amisyn) |
| | | 25457092 | |
| SUPT20H | NM_001014286 | chr13: 37585794- | suppressor of Ty 20 homolog (S. cerevisiae) |
| | | 37585696 | |
| TAF2 | NM_003184 | chr8: 120771346- | TAF2 RNA polymerase II, TATA box binding |
| | | 120771264 | protein (TBP)-associated factor, 150kDa |
| TAF2 | NM_003184 | chr8: 120757276- | TAF2 RNA polymerase II, TATA box binding |
| | | 120757121 | protein (TBP)-associated factor, 150kDa |
| TASP1 | NM_017714 | chr20: 13395909- | taspase, threonine aspartase, 1 |
| | | 13395770 | |
| TBC1D15 | NM_022771 | chr12: 72278640- | TBC1 domain family, member 15 |
| | | 72278801 | |
| TCF12 | NM_207037 | chr15: 57227695- | transcription factor 12 |
| | | 57227728 | |
| TCF4 | NM_001243226 | chr18: 53202868- | transcription factor 4 |
| | | 53202790 | |
| TIAM1 | NM_003253 | chr21: 32641011- | T-cell lymphoma invasion and metastasis 1 |
| | | 32640727 | |
| TJP2 | NM_004817 | chr9: 71792959- | tight junction protein 2 |
| | | 71793045 | |
| TMEM189- | NM_199203 | chr20: 48713357- | TMEM189-UBE2V1 readthrough |
| UBE2V1 | | 48713209 | |
| TMEM214 | NM_017727 | chr2: 27260130- | transmembrane protein 214 |
| | | 27260168 | |
| TNRC6A | NM_014494 | chr16: 24769760- | trinucleotide repeat containing 6A |
| | | 24769920 | |
| TMC3 | NR 120365 | chr15: 81633491- | transmembrane channel like 3 |
| | | 81633560 | |
| TNS3 | NM_022748 | chr7: 47337036- | tensin 3 |
| | | 47336903 | |
| TOE1 | NM_025077 | chr1: 45807382- | target of EGR1, member 1 (nuclear) |
| | | 45807415 | |
| TRAF3 | NM_145725 | chr14: 103356688- | TNF receptor-associated factor 3 |
| | | 103356763 | |
| TRIM65 | NM_173547 | chr17: 73887959- | tripartite motif containing 65 |
| | | 73887894 | |
| TSPAN2 | NM_005725 | chr1: 115601892- | tetraspanin 2 |
| | | 115601858 | |
| TTC7B | NM_001010854 | chr14: 91171677- | tetratricopeptide repcat domain 7B |
| | | 91171544 | |
| TUBE1 | NM_016262 | chr6: 112405449- | tubulin, epsilon 1 |
| | | 112405392 | |
| TYW5 | NR 004862 | chr2: 200813345- | tRNA-yW synthesizing protein 5 |
| | | 200813295 | |
| UBAP2L | NM_001287816 | chr1: 154234649- | ubiquitin associated protein 2-like |
| | | 154234678 | |
| UBE2V1 | NM_199144 | chr20: 48713357- | ubiquitin-conjugating enzyme E2 variant 1 |
| | | 48713209 | |
| URGCP | NM_001077664 | chr7: 43945050- | upregulator of cell proliferation |
| | | 43944971 | |
| VAV2 | NM_001134398 | chr9: 136698500- | vav 2 guanine nucleotide exchange factor |
| | | 136698469 | |
| VPS29 | NM_057180 | chr12: 110937351- | VPS29 retromer complex component |
| | | 110937340 | |
| WDR27 | NM_182552 | chr6: 170087077- | WD repeat domain 27 |
| | | 170087013 | |
| WDR27 | NM_182552 | chr6: 170061846- | WD repeat domain 27 |
| | | 170061799 | |
| WDR37 | NM_014023 | chr10: 1148398- | WD repeat domain 37 |
| | | 1148517 | |
| WDR91 | NM_014149 | chr7: 134890341- | WD repeat domain 91 |
| | | 134890209 | |
| WNK1 | NM_018979 | chr12: 1004327- | WNK lysine deficient protein kinase 1 |
| | | 1004362 | |
| XRN2 | NM_012255 | chr20: 21307793- | 5′-3′ exoribonuclease 2 |
| | | 21307903 | |
| XRN2 | NM_012255 | chr20: 21326472- | 5′-3′ exoribonuclease 2 |
| | | 21326525 | |
| ZCCHC8 | NM_017612 | chr12: 122963343- | zinc finger, CCHC domain containing 8 |
| | | 122963211 | |
| ZFP82 | NM_133466 | chr19: 36891305- | ZFP82 zinc finger protein |
| | | 36891187 | |
| ZNF138 | NM_001160183 | chr7: 64277652- | zinc finger protein 138 |
| | | 64277713 | |
| ZNF232 | NM_014519 | chr17: 5012080- | zinc finger protein 232 |
| | | 5012041 | |
| ZNF37BP | NR 026777 | chr10: 43046910- | zinc finger protein 37B, pscudogene |
| | | 43046848 | |
| ZNF680 | NM_178558 | chr7: 64002295- | zinc finger protein 680 |
| | | 64002108 | |

[2151] The sequences for iExons produced in certain affected genes at the indicated coordinates from Table 11 are shown in Table 12. In certain instances, detection and analysis of the amount and type of iExon sequences are useful biomarkers produced as a result of contacting a cell with a compound as described herein or administering to a subject in need thereof a compound as described herein.

TABLE 12

| Gene | | |
|---|---|---|
| Symbol | Coordinates | Sequence |
| ABCC3 | chr17:48767318- | GGCCCATAGGAAGGACGCAAAGGCCTGTGTGTGCAGGCC |
| | 48767437 | AGAAAAAGGCTATCCACACAGGGTGGCCAGGACACTTTCT |
| | | CCTGTAAGGAAGGGATGCACCAGCCAGGCCTGAAAGAAT |
| | | GA (SEQ ID NO: 3695) |
| ADCY3 | chr2:25061781- | CGGATCAAAGATTGAAGAAAGATTGTACTCCTGTGTCGTG |
| | 25061716 | GCTCCAACACTGAGGCTGAGATGGGA (SEQ ID NO: 3696) |
| AGPAT4 | chr6:161687802- | GATACTGCAGCCATCAGCAGACAATCAATGCAATCATCTC |
| | 161687740 | AGACTGTGTCCTGCGTCCCAGGA (SEQ ID NO: 3697) |
| ANKRA2 | chr5:72851082- | AAGTACTGTCAGCTTTGAAGGAGAAGGCTTCATGGAGGAG |
| | 72850950 | CTGTGACTTGACTCCAGAGTGAAAGGATAATTAGGATTGA |
| | | TACAGGACGGAGGAAGGAAGGCATCCAGGCAATCTCAAT |
| | | AAAAGCATCCATGA (SEQ ID NO: 3698) |
| ANXA11 | chr10:81916254- | AGTATCTCCTGCATGCCAGCAAGCTATGGACATCTGGAAG |
| | 81916134 | AAGCCACATGCCTTGCCCTCAAGTTGCTTAGGGTGGAAGG |
| | | AAATGATTAGAAATGAGCCAAGCCGAGCCTGCACTCTTAG |
| | | A (SEQ ID NO: 3699) |
| APIP | chr11:34933660- | CTCTGAAATTAAATCCCTACTGACTGGCCCTTGAACTGATT |
| | 34933520 | TTTTCTAACATCAGCAAAAGTCAAGGAGTGTTTCCCTAAA |
| | | AAAGAAAGCATTTACTCAGAAACCGTATATTGAAGTCCAG |
| | | GCTGAAAAATGCAAACATGA (SEQ ID NO: 3700) |
| APPL2 | chr12:105625422- | TCAGGGCTGTACGCTGTGGACCAAAGATCATGCTCGCTGA |
| | 105625147 | TGAGAGCCACCCTGCTGGTGACCTCAGTGCTGCCGACCCA |
| | | TTTACATCCCAGCCCTGCCACATTCCTACAGTGGGAGGTT |
| | | GAACACATTTCTTAACCTTGATGAGCCTCAGTTTCATCATC |
| | | AGTAAAATGAAGTTAATGGAACCATGGAATCTACCTTGGA |
| | | GAGTTGCTAGAAGAATTAAATGAAGTCACATATGTTTAGT |
| | | GCCCAGCACAGCGTCCAGCACATAGGTGGTACAGA (SEQ |
| | | ID NO: 3701) |
| ARHGAP1 | chr11:46718619- | GGCCGTCAACCTTTCCACCTTGAAACTGGTGTCAGGAGCA |
| | 46718571 | CCCTGCAGA (SEQ ID NO: 3702) |
| ASAP1 | chr8:131173039- | GTTGTTGCAGCTGCGCACCTGCTCTGTGAAGCACAGATTG |
| | 131173031 | TCATGGGGGCAGTTCTCTCAAAAACATGGCATATTGTGAT |
| | | GA (SEQ ID NO: 3703) |
| ASAP1 | chr8:131135828- | AGCAAACCCCATTGTCAGGGGAAAGCAGAACAAAGAAAA |
| | 131135650 | GTATTTAGAAATGTATTTCCGGGATGCACAGATTCTTTTCA |
| | | CCCTCACCTTCCCCTAGGTTGTTGCAGCTGCGCACCTGCTC |
| | | TGTGAAGCACAGATTGTCATGGGGGCAGTTCTCTCAAAAA |
| | | CATGGCATATTGTGATGA (SEQ ID NO: 3704) |
| ASAP1 | chr8:131135731- | TCTAGGAGA (SEQ ID NO: 3705) |
| | 131135650 | |
| ASAP1 | chr8:131173046- | ATCGAAGTCTAGGAGA (SEQ ID NO: 3706) |
| | 131173031 | |
| ASPH | chr8:62,421,470- | TCATTCTGATCTACTGAAATTCCCCAGTTCAGACTCCATTG |
| | 62,421,527 | AAAGCCCTGGGATGGCA (SEQ ID NO: 3707) |
| ATAD2B | chr2:23976387- | GTCATCTGAGCAAATGTAATCACTCATCTACCCACAAAAT |
| | 23976214 | GGCTAAATGACTTAATTCAACTCCCTTTGTTGATTTGCCTG |
| | | TTAGTTTGTTTATCTGGTGGTCTATCTATTAAATGTTTATTG |
| | | AGTACCTGCAGTGCCAGATGCTGTGCTGGGTGTTTGGAAT |
| | | GCAAAAAATGA (SEQ ID NO: 3708) |
| ATXN1 | chr6:16409524- | TTTCATAAAGAGGACAGACGCTAAGGCAATTGTGTGGAAC |
| | 16409426 | AGAGCAGCTTCTCGGGGTAACCATCTCCTGCTGATGTATA |
| | | AATATCGGGGCAAAACTGA (SEQ ID NO: 3709) |
| BECN1 | chr17:40963348- | GATCCCATTGATGGATGGAAACTCTAGTTTTTACTTAGA |
| | 40963310 | (SEQ ID NO: 3710) |
| BHMT2 | chr5:78374568- | GATGTTTTCATCTGGCCCAAGAAGAACTTGTTCTTAATGTT |
| | 78374655 | AAAAGACCTTTTTGCTAAACTGGGAAGAAAGTGCTGGAAT |
| | | AACAAGA (SEQ ID NO: 3711) |
| BICD1 | chr12:32486172- | GTCAATTTCTGCCTTGTGGATAATTTTCTGAATCTGTAATA |
| | 32486263 | TTTCTGAAGATTCCTCCAAGTATTTACAGAACATACAGAA |
| | | GTATTTTATGA (SEQ ID NO: 3712) |
| BTN3A1 | chr6:26404363- | ATCTTGTTCTCAGAGGCCATTCCCAGACCCACAGCAAGAG |
| | 26404455 | GGATTATGGCTGCAGGCCTCATGCTCCTTTGTTTTGGAAGA |
| | | AACTGTTGAGGA (SEQ ID NO: 3713) |
| C11orf30 | chr11:76259972- | GCCTTGTTCAAAGCTCTGGGCATCTAGCAATGAGTAAGAT |
| | 76260061 | AGTCAAGATCTGTGCTCTGTCCACGTTCTCTTGGAGCTTAC |
| | | ATTTTAAGA (SEQ ID NO: 3714) |
| C11orf73 | chr11:86037555- | GTAATTATTGAACATCTACTTGCTGCCTACTTTCAACATCT |
| | 86037718 | GCATGTGTGTGTGAATATTAAATATCACACCAAGACATTG |
| | | TTCAGAGGAGACAGAATAGTGAGCTGAGATAAATGAGAA |
| | | TCTCTCTATGGAAGATTAGACTGGAGCATGAACTTGAAAT |
| | | ATGA (SEQ ID NO: 3715) |
| C14orf132 | chr14:96506612- | AACAAAGACAAATCCCGGATTTCTCCATCAGTCTGTGACC |
| | 96506704 | CTAGAGAAGACCCAGAGCTGGCTCCAGGGAAGGGCTGCG |
| | | TTTGGCCTGGGAGA (SEQ ID NO: 3716) |
| C8orf88 | chr8:91990874- | TGTTCCCTTTCAACTTTCAAAACGAATATCCATGCAACACT |
| | 91990807 | CAGTGCATACAAAGTGGAGTTAGCAGA (SEQ ID NO: 3717) |
| CASC3 | chr17:38298307- | GAGAAAGTTTCCTGTCTTTTGGATAAACTACTAGAGATGC |
| | 38298353 | CATCAGA (SEQ ID NO: 3718) |
| CASP7 | chr10:115477382- | GGTTGCAGAGAGCACTGGTTGAAGCCTATCCTGAAGCTAC |
| | 115477512 | CTTGGTAGAGGAGTTAATTGCACCAGGAGACCTAATTTCA |
| | | GAAAGGTCACAGATTATATTCCACCCTCCACAAAAGTAAC |
| | | CTGGAAGATGA (SEQ ID NO: 3719) |
| CCDC122 | chr13:44431087- | TAACATATTTTATTGAGGTATAATTGTCATAAGA (SEQ ID |
| | 44431054 | NO: 3720) |
| CDH13 | chr16:83402146- | GTTTTTTGGGAACAGGTGGTGTTTGGTTACATGA (SEQ ID |
| | 83402179 | NO: 3721) |
| CECR7 | chr22:17,535,915- | CGAGAGGAAGAGGAGAAGCATGCAGGAGTGTACATGAAA |
| | 17,535,996 | CAAGATTGGCCACGAGATGACAAATATCTGAATCCGCTGA |
| | | TGA (SEQ ID NO: 3722) |
| CEP112 | chr17:63684725- | AACCAACTTCAAGATGGCTGCAGCAGTGCCAGGCATTCTG |
| | 63684629 | CCCAGATCTGCACTATTCGGAGGCAGAAAAGGGCTGCCAG |
| | | TTTCTAGGGCCTAATGA (SEQ ID NO: 3723) |
| CMAHP | chr6:25107418- | AATGAACACTCCATGAGAGCAGGGACCTGCTTTGCCTTGT |
| | 25107336 | TCACCACTTTATTCCCAGTGGCTAGAACCACGTCTGACAC |
| | | AGA (SEQ ID NO: 3724) |
| CNRIP1 | chr2:68,542,833- | GTCTTACTCTTGTCACCGAGGCTGGAGTGCAGTGGTGTGA |
| | 68,542,986 | TCATAGCTCACTGCAGCCTCAACCTCCTGGATCCAAGTGA |
| | | TCCTCCTGCCTCAGCCTCCCAAGTTGCTGGCACTACAGGTG |
| | | TGGTATCACCACACCCGGTTAACTAAAAAAAAT (SEQ ID |
| | | NO: 3725) |
| CNRIP1 | chr2:68542975- | TTAACCGGGTGTGGTGATACCACACCTGTAGTGCCAGCAA |
| | 68542840 | CTTGGGAGGCTGAGGCAGGAGGATCACTTGGATCCAGGA |
| | | GGTTGAGGCTGCAGTGAGCTATGATCACACCACTGCACTC |
| | | CAGCCTCGGTGACAAGA (SEQ ID NO: 3726) |
| CPSF4 | chr7:99045396- | AAGAGACAGGATTTCACCGTGACAGCCAGGATGGTCTCCG |
| | 99045536 | TGCCAGCCAGGATGGTCTCGATCTCCTGACCTTGTGATCC |
| | | GCCCACCTCGGCCTTCCAAAGTGCTGGGATTACCAGCGTG |
| | | ATCCACTGCGCCCGGCCATGA (SEQ ID NO: 3727) |
| CRISPLD2 | chr16:84869783- | ATTGGGTCTTATCCCCAAGATATCTCATTATGTACATGCAA |
| | 84870041 | ATCAGCGGAGCATCGTCATGACACCAGGAGGACACCCCGT |
| | | GACGCCGATTACCGCACTCTCAACCTCAACCCAGCGTCAG |
| | | AGTTTTCTGGCATCTCTTCTTTGAGCCTGGCCGCCTGCAGC |
| | | TGGAAATGCTCATATATGGTGGTGTGACTAACCTGAGAGA |
| | | GAGAGATCAGGGATCCTGAGAAGTTCTGCATTCTTGGTCT |
| | | GCTTCCCAGTGGGACGA (SEQ ID NO: 3728) |
| CRYBG3 | chr3:97635177- | GGCCTTTCTGTCTGGTGTGTGCAGAATGATCTGGGTCACCT |
| | 97635237 | CTGAGGCCCATATTTATAGA (SEQ ID NO: 3729) |
| CSNK1G1 | chr15:64575350- | GTTATTGGGGTACAGATGGTGTTTGGTTACATGA (SEQ ID |
| | 64575317 | NO: 3730) |
| DAGLB | chr7:6474651- | TTGGATCATCATCGCTGCCACAGTGGTTTCCATTATCATTG |
| | 6474425 | TCTTTGACCCTCTTGGGGGGAAAATGGCTCCATATTCCTCT |
| | | GCCGGCCCCAGCCACCTGGATAGTCATGATTCAAGCCAGT |
| | | TACTTAATGGCCTCAAGACAGCAGCTACAAGCGTGTGGGA |
| | | AACCAGAATCAAGCTCTTGTGCTGTTGCATTGGGAAAGAC |
| | | GACCATACTCGGGTTGCTTTTTCGA (SEQ ID NO: 3731) |
| DCAF17 | chr2: 172298369- | TTTTGCCAAGGAGTTTGTCCACAGAGCTCTTCATGCCCTCA |
| | 172298546 | TGCTGGAAGTGGAAATCTGGACATGTTATCTTATCATGTC |
| | | ATTATCACACCTAGGAAAATGAGCAACAATTCTTCAGGAT |
| | | CATTTAATGTCAAGTTTATAACTTCCTGCTTTAACTTAAAA |
| | | AAAAAATTAAATTAGA (SEQ ID NO: 3732) |
| DCUNID4 | chr4:52775086- | GCCGAAGATGGTGTTAGTGATTGCGAGCTGCTGGCTGGCA |
| | 52775141 | CCCTTGCAGAGCAGGA (SEQ ID NO: 3733) |
| DDX42 | chr17:61883354- | GTGCAGTTTGAACAGGGCTTGACAGTGGCTGGACCATCAC |
| | 61883511 | TAAGTGAGACTTTAATTCATCAAGCATAACTGAAAATGGA |
| | | GGCAGTAGATTATATCTTGGTAGCCAGCATGTGTAGACTT |
| | | GTCTTATTTGGAGCCCACTTGGAATTTTCATTTCAAGA |
| | | (SEQ ID NO: 3734) |
| DENND1A | chr9:126385380- | CTGTGGCATAAGAATGAAAAGAAAAGAAACAAAAGCAGA |
| | 126385322 | TGGCAGAGAAAACGAAAGGA (SEQ ID NO: 3735) |
| DENND5A | chr11:9227781- | GCCAAAATCATATTATATGATCAACCTCAAGTGCATGGGA |
| | 9227736 | AGCTGTGAAAGTGAACATTGAACTGGGTATAATGTTACCC |
| | | TGAACAGTATGAAGGTCTATGAGCAAGAAAGAAGGGGTG |
| | | AATGAATTATGA (SEQ ID NO: 3736) |
| DENND5A | chr11:9198449- | ATAGGACAGCATTTAAAAATCTCATGTGGAAGAATATACC |
| | 9198319 | ACTAGA (SEQ ID NO: 3737) |
| DGKA | chr12:56333603- | ACCTGGGCCTCCCAAGCATTATCCAGCTCAGTTCCTGCCTG |
| | 56333699 | GCACATGGATGGTGTGGGGCAGGCATGCAGTAGCAGCTG |
| | | ATCTTTTAGGAGGAAGA (SEQ ID NO: 3738) |
| DIAPH3 | chr13:60266972- | GTAAATTAGACCCAAAATAACTCCCAGGGAGCAATACAC |
| | 60266851 | AGCCTGGAAAACATGAAACAAGGAGCGGCTGTTTGGTGT |
| | | AATAAAGGAGGAGCACCAGGCTGAATTTTCAGAGGCCTA |
| | | ATAGA (SEQ ID NO: 3739) |
| DIAPH3 | chr13:60548266- | GGTTTTGTTCCTAATGTCACATGTTTCCTAAGTAATTCAGC |
| | 60548219 | ATAAAGA (SEQ ID NO: 3740) |
| DLGAP4 | chr20:35127645- | GAGAGGACTAGAAGGAACGGTTCCCACCTCTCGGAGGAC |
| | 35127724 | AACGGACCCAAAGCGATCGATGTGATGGCACCCTCCTCAG |
| | | A (SEQ ID NO: 3741) |
| DNAJC13 | chr3:132227720- | CCCACTGTGGAGACCTACTGCTCAGGAAAAAAAGAGCTTT |
| | 132227883 | CAAAATACTACTGCTCGTTGGCAATGCACCTGGTCACCCA |
| | | AGAGCTCCGATGGAGATGTACAAGGAGATTAATGTTTTCA |
| | | TGCCTGCTAATACAGCATCCATTTTGCAGCCCATGGATCA |
| | | AGGA (SEQ ID NO: 3742) |
| DNMBP | chr10:101762780- | TTTGAAAATCAAATATTGAATGCAAAAGCTAGGAAGCTGT |
| | 101762699 | AAACAGGAAACGTAAACGAGAAAGAACAAGCAGTGAATA |
| | | CGA (SEQ ID NO: 3743) |
| DNMBP | chr10:101654399- | CATTGGCCAGGACTACTAGAACTGTGTCAAAACAGCTGCT |
| | 101654318 | ACACTAACGGGCATCTTTGTCTTGTTCTCAGTCTTAAAAAG |
| | | A (SEQ ID NO: 3744) |
| DOCK1 | chr10:128901890- | GAACGTTGGGGATGCAGATGACCAGTATCTAGTGCTGCGT |
| | 128901944 | GACTTTGGATTACGA (SEQ ID NO: 3745) |
| DYRK1A | chr21:38794884- | GTTCAGGGATGCTGGAAAGGACACTGAAGTAGGCCTTGGC |
| | 38794954 | TGATGGGCCTTTCAGAAGTGAACACTTAAGA (SEQ ID NO: |
| | | 3746) |
| EIF2B3 | chr1:45350395- | GGAACTGACTTGTTTTCCAATGGAGGAGGAACATTTGCTG |
| | 45350311 | CCTACACTGGTTTGAAGCATTAAAAGGGGAGAAAAAGAG |
| | | CTAAGA (SEQ ID NO: 3747) |
| ENOX1 | chr13:43,984,307- | TTACTCTAGAAGTCGTACTACATTTTCTGAGAGAAGTAGG |
| | 43,984,398 | AGGTGAGACGAGAGTAAGTAACTTCTGCTCTCTGAATATT |
| | | TCAATTAGGCAG (SEQ ID NO: 3748) |
| ERC1 | chr12:1536281- | ACAGACCCTTCCAGAACCAGATGACCATCAAGACAAAAG |
| | 1536343 | CATACTCAAGCAGACAAGAAAGGA (SEQ ID NO: 3749) |
| ERCC1 | chr19:45917292- | GTGACTGAATGTCTGACCACCGTGAAGTCAGTCAACAAAA |
| | 45917221 | CGGACAGTCAGACCCTCCTGACCACATTTGGA (SEQ ID NO: |
| | | 3750) |
| ERGIC3 | chr20:34142143- | TACATGCTGTGGAGA (SEQ ID NO: 3751) |
| | 34142157 | |
| ERLIN2 | chr8:37594849- | GGCCAAAGGAATAACTGGGAAGGTGGATGCGAGGCCAAC |
| | 37594946 | GAATCCTACCTTGAAACTCTGCTCGCCTGCTGGCTCTGCCA |
| | | CTCCAGCATCTGAAAGGA (SEQ ID NO: 3752) |
| EVC | chr4:5743061- | TTCCATACAACTATCCCGCTGATTCTTTCTTCAAAGAAGCA |
| | 5743168 | AACCCTCCTTTGCTTTTTATATTTTCTTCACACATGGAAAT |
| | | GGGGGATGTGGAGGGCCTTGCACAGA (SEQ ID NO: 3753) |
| FAF1 | chr1:51003153- | TAATTTTTAACAGTGTAAAGGGGTCCTGAGACCAAAAAGT |
| | 51003085 | TTGAGAACTGCTGCAATCAACTATAAAGA (SEQ ID NO: |
| | | 3754) |
| FAIM | chr3:138335412- | GCTGGTCTCGAGTTCCTGGCTTCAAATGATTCTCCTGTCTC |
| | 138335506 | AGCCTCTCAAAGTGCGGGGATTACAGGGATGAGCCACCAT |
| | | GCACACTCCAAGGA (SEQ ID NO: 3755) |
| FAM126A | chr7:23011932- | GTCAATTTTTCTGACCACCTGAACAGATTGTTTTCTGTCAA |
| | 23011871 | TTAAGGGCAGCTTTGTTACGA (SEQ ID NO: 3756) |
| FAM13A | chr4:89890343- | GTTTTGGGGAAACAGATGGTGTTTGCTTACATGA (SEQ ID |
| | 89890310 | NO: 3757) |
| FAM174A | chr5:99917051- | ACTGCTGTGGAATTCCTGAGAAAGAGCAACTGAGGGATA |
| | 99917108 | GCAACATGGATTTCACTGA (SEQ ID NO: 3758) |
| FAM198B | chr4:159091499- | CAGCAGCAGCAGCGTGTCTTTCCATGCGCTTGGCATTCTTT |
| | 159091399 | ATTTTCCCAGCCTGGGAGGATATGAGAGTTCCAGGGAAAT |
| | | GCTGTATTGGACATGCAAGA (SEQ ID NO: 3759) |
| FBN2 | chr5:127850450- | GATTAATTACCGTTAATGTCTTGGAGACTATAACGTACAC |
| | 127850370 | TGCACGTTGTAATAACACAAAAGGACAAGCAAGATGTAA |
| | | GA (SEQ ID NO: 3760) |
| FER | chr5:108321155- | GTTTCTGGGGAGCAGGTGGTGTTTGCTTACATGA (SEQ ID |
| | 108321188 | NO: 3761) |
| FHOD3 | chr18:34322340- | GACAAAAAGCAAAGAAGAAGACTGTGGTCTAGAAGCCGA |
| | 34322431 | AGGAAGATGAGAAGGAAGAGTGTCCGAGGAGTCAGCCAC |
| | | AGCCAGAAAGGAGA (SEQ ID NO: 3762) |
| FOCAD | chr9:20737106- | CATTGACTCCGTTATCTACACAATAAAATCTGGATCCACA |
| | 20737152 | GATAAGA (SEQ ID NO: 3763) |
| GALC | chr14:88447791- | GTTTTTGGAGAATAGGTGGTATTTGGTTACATGA (SEQ ID |
| | 88447758 | NO: 3764) |
| GCFC2 | chr2:75913102- | CAAGAGAGAAAGAGAGGAATCAAGAATGGGTCCATTGAG |
| | 75913000 | GAATTGGCCTGAGCAACTGGAAGGACAGAGGTGCCATTTC |
| | | CTGAAATGAAAAAGTCTGACAGGA (SEQ ID NO: 3765) |
| GGACT | chr13:101194723- | TAAGATGCTATGAGGAAATCCGTGCACGAGGGATGACAG |
| | 101194628 | CGTGGCAGGCTGGAACACGCTTTTTAGATTTACTTTCGTGG |
| | | ACTGGATCTGTTAAGA (SEQ ID NO: 3766) |
| GLCE | chr15:69517534- | GGCAGAGGTGGAGAGGGGTTAGATTATTTCATCTGCCCTA |
| | 69517591 | CAGTTGGCATAATAAAGA (SEQ ID NO: 3767) |
| GOLGA4 | chr3:37285619- | GTCCAGGGATTGAAGGCTGGGGAGTAGAGCCATCCTGGGT |
| | 37285734 | CAGGCTGCTGGTAGGAGCGGTGGGACCTGAAAGACGTGG |
| | | CGGCGTGGCCGGCGTCCAGCGCCCGAGGCTGTCACGA |
| | | (SEQ ID NO: 3768) |
| GOLGB1 | chr3:121401810- | AGGTGCCTGATGCTGTTAATTCCTGAGCCTTTTGAAGATTC |
| | 121401764 | TGCAGA (SEQ ID NO: 3769) |
| GXYLT1 | chr12:42489016- | GGATTGTTTGTATTCCTGCCAATGATTTGTGAGACAGTCTG |
| | 42488953 | TTCCCCACATCCTCGTCAACAGA (SEQ ID NO: 3770) |
| HAT1 | chr2:172803228- | TTCGTTTTCCTGAAGATCTTGAAAATGACATTAGAACTTTC |
| | 172803303 | TTTCCTGAGTATACCCATCAACTCTTTGGGGATGA (SEQ ID |
| | | NO: 3771) |
| HLTF | chr3:148769931- | TCTTGCTCTGTCGCCCAGGCTGGAGTGCAATGGCGCGATC |
| | 148769832 | TCAGCTCACTGCAACCTCCACCTCCCAGGTTCAAGTGATC |
| | | CTGCTGCCTCAGCCTCTTGA (SEQ ID NO: 3772) |
| HMGA2 | chr12:66267911- | CTTGTTGGGAATAAGA (SEQ ID NO: 3773) |
| | 66267926 | |
| HNMT | chr2:138724667- | ATACCAGAATTGCTGTTAACAAATAAAATACTGGCCAGAT |
| | 138724956 | GTGTTGGTTCACGCCTGTAATCCTAGCACTTCGGGAGGCT |
| | | GAGGCGGGAGGATTACTTGAGCCTAGGAGTTTGAGACCA |
| | | GCCTGGGCAACATAGCAAGATCCCATCTCTACAAAAAAGT |
| | | GAAAAAGTTAGCTGAACAAGGCGGCATGCACATGCTACTC |
| | | CAGACGCTGAAGTGGGAAGATCACTTAAGTCCGAGAGAT |
| | | CGAGGCTTCAGTGAGATATGGCTGAGACACTGCTCTCAGC |
| | | CTGGATGACAGA (SEQ ID NO: 3774) |
| HPS1 | chr10:100195171- | TTTGGAGAATGCCTGTTCATTGCCATCAATGGTGACCACA |
| | 100195029 | CCGAGAGCGAGGGGGACCTGCGGCGGAAGCTGTATGTGC |
| | | TCAAGTACCTGTTTGAAGTGCACTTTGGGCTGGTGACTGT |
| | | GGACGGTCATCTTATCCGAAAGGA (SEQ ID NO: 3775) |
| HSD17B12 | chr11:43838189- | GTTATTGGGGAACAGGTGGTGTTTGGTTACATGA (SEQ ID |
| | 43838222 | NO: 3776) |
| HSD17B4 | chr5:118792986- | CTTTCTGACATCTTAACGAGGCAATACAGAGAGACGAATT |
| | 118793063 | TTCATCAGTTTGTTCAGGGAGACACATATAACAAAAGA |
| | | (SEQ ID NO: 3777) |
| HTT | chr4:3215349- | AGGCAAGCCCTGGTGCTGTGGGAGCCCCAAGGAAGAGCC |
| | 3215463 | TCTGGCCTGGTGGCCACGTAGCCCAGGAGAGATTTCTACA |
| | | GGAGCCCACAGCGCTGAAGGAGAGAGAGGCAGCAGA |
| | | (SEQ ID NO: 3778) |
| IFT57 | chr3:107911373- | ATCCATACATACTTAATGCTGAAATGTGAAGGGCTGAGAA |
| | 107911323 | AAAAGAAAAGA (SEQ ID NO: 3779) |
| INPP5K | chr17:1419412- | CACATACATCAGGAGGTCTGCCTGATCCCATGGTGAACCC |
| | 1419182 | CGGGAATCCGAAATCAGATTGAGATAAGATCCTTTAGGGA |
| | | AGTGACTTAGCCTGGTCTCTTGCCTGCTCTTTCACGGGGAA |
| | | CAACGCTAATCGCCCACTTAGTCTAAGTCACGATGCTTGG |
| | | ATTTGCTGCTAATCGTCGGATTTGAGAGTGGGAACAAGAA |
| | | ATCCGGACTTTTGCTCTCCATCCTCTTAGA (SEQ ID NO: |
| | | 3780) |
| IVD | chr15:40706629- | CTCTGAATGGCCTGTCTCCTGGACAAAGAAGCTTTCACGG |
| | 40706723 | ACTACTCTGCAGGGAGGTGACATTGGACCAGAGCTGACTC |
| | | CACCTGGGGGAAAGA (SEQ ID NO: 3781) |
| KIAA1524 | chr3:108284925- | GTCAGGAATTATGGTTAAAGGTGGATTTTCACTGATGGTA |
| | 108284745 | ATAAGATATTACTTTATACCCCTTCCCTCCTCATGAATTAA |
| | | GTCCATCTAATCTTTACTGAGGACCTGCTGAGTGGTAGAC |
| | | ACTATGATTTGTTTCTGTTTCCACAGATGTCACAATTGTCA |
| | | GTAATTGTGGACCTTTAGA (SEQ ID NO: 3782) |
| KIAA1715 | chr2:176835145- | TTCTCAGGTTTTCTTGACACCAAGAAAGAGAGGGAATCAA |
| | 176834927 | GAAGATCGGTTGTAAGAGAGCAATTCAACATGAAAATACT |
| | | GAAGAAGAGATGGGAGAGAGAGAGAGATAATTGTTTTCT |
| | | TCAGAGTTTTCCACTTTCTATCAGTAACTCTGATCACATGG |
| | | ATATCTATTGTGGGGCTAGTTGATGCATCCCTTCAGATGTG |
| | | TTGGAAAGAGGACCAAGA (SEQ ID NO: 3783) |
| LUC7L3 | chr17:48798190- | TGTAGGAAAGCAAGTTGGTGCTAGATGACTCCTTTTAGGA |
| | 48798241 | CTTTAAGAAAGA (SEQ ID NO: 3784) |
| LYRM1 | chr16:20922505- | GTGAAGTAGTATTTGAAGCTTTTCATCAGTTGGCTCATTCT |
| | 20922586 | TTACTCAAGAATAAACCTCAAGAAACGTCATCAGGGTCAG |
| | | A (SEQ ID NO: 3785) |
| MADD | chr11:47314094- | AATTGTGGAACAAGCACCAGGAAGTGAAAAAGCAAAAAG |
| | 47314147 | CTTTGGAAAAACAGA (SEQ ID NO: 3786) |
| MB21D2 | chr3:192555098- | GCATGTTTATGTGGGAATGTCTCTCCATGTTTACAAACTTC |
| | 192555020 | AGAAGGCCCCTTTGGGAAAGAAAACCTCTCAGAGAAGA |
| | | (SEQ ID NO: 3787) |
| MCM10 | chr10:13239941- | TCTTGCTCTGTTGCCAGGCTAGAGTGCAGTGGCGCAGTCTT |
| | 13240039 | GGCTCGCTACAGCCTCTGCCTCCTGGGTTCAAGCGATCCTC |
| | | CTGCCTCAGCCTCACGA (SEQ ID NO: 3788) |
| MED13L | chr12:116547674- | GTCATTTTTAACATGGATTCTTAGATGCTGACAAATATTGC |
| | 116547579 | CAAATTCCATTCCAAAAGAGGTTACACTTATTTCCTTTCAT |
| | | CAGTGAATGA (SEQ ID NO: 3789) |
| MED13L | chr12:116419435- | CTCCTCTGAGTGTTCCTCCAAATCTGTCTTTTGGAGTAGAC |
| | 116419344 | CTAGAAATCATCTGTTACTAAGGTGTACTATGCATGTGGA |
| | | ACCATTGATTTAAGA (SEQ ID NO: 3790) |
| MEDAG | chr13:31492953- | GAGAGGCCAGGAACAGAATGCCCAGTAACAAGAAGTGCT |
| | 31493127 | CATTAGAACATCTGAAGCCCACGTGTTCTTTGGCTTGATTA |
| | | TAACCAGAAAGCCAGATAGTTCTTTAGGAATGTAATTCAC |
| | | AGCTGTATCAAGTACACCTCCTGCACCGATCACTCAGGAG |
| | | GAATCTAAAAAAAGA (SEQ ID NO: 3791) |
| MEMO1 | chr2:32112156- | AAAGCGTGCTCTGGAATGGATTCACAAATGAGCTACCCTC |
| | 32112104 | CTTCCCTCAAAGA (SEQ ID NO: 3792) |
| MMS19 | chr10:99241240- | CATTAATTTACAGAAATACACGTATTCTCCTTGTTTTGGTG |
| | 99241106 | GAAGCTGCAGCTGCCAATCATCTCTCAAACCCTGTGGGTA |
| | | GCTGCTAAGCTGTATTTCAGAGGAATGTCACAATCATACC |
| | | ACTGGGGAGAAAGA (SEQ ID NO: 3793) |
| MRPL45 | chr17:36468550- | GTCTGGGTGGTGGCTCATACCCGTAATCCAGCACTTTTGG |
| | 36468624 | AGGCCGAAGTGGGAGGATTGTTTCTGGGCAGCAGA (SEQ |
| | | ID NO: 3794) |
| MRPS28 | chr8:80915355- | ATGGGACCTGCAAAGGATAAACTGGTCATTGGACGGATCT |
| | 80915234 | TTCATATTGTGGAGAATGATCTGTACATAGATTTTGGTGG |
| | | AAAGTTTCATTGTGTATGTAGAAGACCAGAAGTGGATGGA |
| | | GA (SEQ ID NO: 3795) |
| MTERF3 | chr8:97263851- | GGACGTGTCTCCGTGCTAAAGACCTAGAGATTACAACGAT |
| | 97263810 | GA (SEQ ID NO: 3796) |
| MYCBP2 | chr13:77628142- | GCATCTAGCATAGAACTCCCTATTCTGCATTATGACTACTG |
| | 77628054 | GACCACTTATCTCTCTGCCCTACTTGATAAGTTCCATGAGG |
| | | ACAAAGA (SEQ ID NO: 3797) |
| MYCBP2 | chr13:77692630- | GTGACCAACTGAGTGCCATATTGAATTCCATTCAGTCACG |
| | 77692475 | ACCCAATCTCCCAGCTCCTTCCATCTTTGATCAAGCTGCAA |
| | | AACCTCCCTCTTCCCTAGTACACAGCCCATTTGTGTTCGGA |
| | | CAGCCCCTTTCCTTCCAGCAGCCTCAGCTTCAGA (SEQ ID |
| | | NO: 3798) |
| MYOF | chr10:95117679- | GGTGAGAAGTTTCTGAAGGTGCTTGAACGCTCTTCTTCCA |
| | 95117562 | CACGAGGGCACCAAGTTGAAGCGGGAAGAACACTGAGCC |
| | | ATCAGTTAGAAGGCTCAGGATATGGTCCAGTTCTAACGA |
| | | (SEQ ID NO: 3799) |
| NREP | chr5:111086122- | TGTTCCAGGGCGCCATTAACGATTGGAGTTGGCACAAAAT |
| | 111086049 | TTGAAACTAGAAGTGGACTATTTGCTCCTTGAGA (SEQ ID |
| | | NO: 3800) |
| NSUN4 | chr1:46823248- | GGGCTCAGGAGTCCAGCGGTCCTAAGTATACCTTGCAGCC |
| | 46823331 | ATCTTCCTAAAAGTTCTGACCATGACTGAGGACACTGAGA |
| | | AGGA (SEQ ID NO: 3801) |
| NT5C2 | chr10:104853974- | AGTTTTGGTCTTAACTGAAACAGTCAAACAAACCCACTAA |
| | 104853926 | TTGAAAAGA (SEQ ID NO: 3802) |
| OSMR | chr5:38876877- | CTTCCTGAGAGTTTCTTGGCCTATACCCAGCTGAAGTGCA |
| | 38876923 | GGGAAGA (SEQ ID NO: 3803) |
| OXCT1 | chr5:41734751- | ATTTTGAAAGAAGTCTGTCTCTCAAATATTTAAAGAATCA |
| | 41734677 | AAATGATGTCGTATTAAAGCTTGACAAGCTAATGA (SEQ |
| | | ID NO: 3804) |
| PAPD4 | chr5:78937278- | AGCTCTACCTCTGTTTTGAAATGTCATTAGTTTGGATATGT |
| | 78937340 | TACCAGGATGCAGCAAAGAAGA (SEQ ID NO: 3805) |
| PCM1 | chr8:17818551- | TTATGGACCAGCATTTCCATCTTTTACTGGCCTGAAATAAT |
| | 17818653 | ATAATAAAATCTTTAAGCCACCATAAGATATCTAAGGAAA |
| | | ATAACTGTATGTGGTTTAAAGA (SEQ ID NO: 3806) |
| PDS5B | chr13:33263018- | GCATTAGAAACATTCATATTATGAAAATACTACCTTTTTAT |
| | 33263158 | TCTCACTTGGTGTACTGATGTGCATTACGGTGGAGAGCAG |
| | | TAGGCTGCAGATTTTGTGCTGCATAGCCTGAGCAGCACCG |
| | | TGTTATAGTTTGACATAAGA (SEQ ID NO: 3807) |
| PIK3R1 | chr5:67538784- | TGCTCTACAAGTATAGAAAGAAGCCTTCCTCTTCCCACCG |
| | 67538973 | TCCCCAGACACCACATAATGGAAAAAGCAAGAATTTTCTG |
| | | CATAAGCAAGGCCTTAAAAAAAAAAAAGCCAGCCTCTGA |
| | | TGGGACTTCTTTCCTGCCAGAAATCCCACTGGTCCACTGTC |
| | | GCAATTTTTACAAAAGGCCACGATGAAAGA (SEQ ID NO: |
| | | 3808) |
| PIKFYVE | chr2:209176229- | TGGAAAGAACCTCATTTGAGCTATGCTTGGTCACAGACCT |
| | 209176294 | AGAGAAAGTTCACGGGGAAGTAAAGA (SEQ ID NO: 3809) |
| PITPNB | chr22:28288318- | GCGAAAATGGGCAGTGTTTACAGGCATGAATGCTGGTGGA |
| | 28288117 | AAGAGCAGAGTAAGGGCAGATTGCACAAGAACCGTGGAG |
| | | GCCCTGGTTCCCATCACCTCCACCTCAGCACAGACTTCAG |
| | | AGAGGAGAGGAGGCACTGGATGCATGACAGCAGCACTTG |
| | | AGATAGGTGCTCCAGGTGGAAGGCACTGCACATGCAAAG |
| | | GCTGA (SEQ ID NO: 3810) |
| PITPNB | chr22:28290410- | TGAGCTTGGAGTGAAGTCTAGTACGTCTGTGCAGCAAAGA |
| | 28290364 | GACCAGA (SEQ ID NO: 3811) |
| PLSCR1 | chr3:146255831- | GACCACATAAACCCATTTTGAATTATTCAACCATTGCTGA |
| | 146255783 | ACTTCTTGA (SEQ ID NO: 3812) |
| PMS1 | chr2:190683464- | GGATTCCCCCAGCAGACGTTTTTCATCTAAGAAATGGCTT |
| | 190683555 | GAGTGCTTCCTTTTATCGGGTGCTGTGATAGATTCTCAAAA |
| | | TATGAAAATGA (SEQ ID NO: 3813) |
| PPIP5K2 | chr5:102492916- | AACCCAACACAGATCTTAATACCATGAAAAGGA (SEQ ID |
| | 102492948 | NO: 3814) |
| PRSS23 | chr11:86651889- | AGCAATCTCTTTGTATTTATACAATTATGACAACAGTAGTA |
| | 86652069 | AGAGAAGAAGGTTCAGAGGATACAAGGTAACACACCTAC |
| | | ATAAACGACCTACTGGGTACAAATATTGTAAATCAACATA |
| | | GGCCTAGAAAAGGTGGTCAGATGCTGAATTTTGACTAAAT |
| | | ACCTCCGATGGCACATAATGA (SEQ ID NO: 3815) |
| PRUNE2 | chr9:79234303- | AACTAGCTGCCTTTACAATGATCCAGAAATGTCTTCTATG |
| | 79234256 | GAGAAGGA (SEQ ID NO: 3816) |
| PSMA4 | chr15:78834921- | AGAGACGCAACATCCACAAGCTTCTTGATGAAGTCTTTTT |
| | 78834987 | TTCTGAAAAAATTTATAAACTCAATGA (SEQ ID NO: 3817) |
| PXK | chr3:58321084- | CTGTAAAGTTTGACTGAGAAATGTTGCATCAGCCCTGAAG |
| | 58321179 | TTTATTGAGAAAATCTTACGCTGATGCAAACTTTTTGGACT |
| | | GTTAGTGTCTTATGA (SEQ ID NO: 3818) |
| RAF1 | chr3:12645036- | AATAACAACCTGAGTGCTTCTCCCAGGGCGTGGTCCAGAC |
| | 12644977 | GATTTTGTTTGAGGGGAAGA (SEQ ID NO: 3819) |
| RARS2 | chr6:88257102- | AATTGGAGAAATTAGTACTTGTGGCATAGATTGTTGTGCG |
| | 88256965 | GTCAGCTCTTACTGTTCTTGAGCAGCATTTTAAGAGAAGA |
| | | AATGACAGGACTTGATGAAAAAGTATAAGAAATATACAG |
| | | TATAAAAAAAGCTATATGA (SEQ ID NO: 3820) |
| RFWD2 | chr1:176044514- | GACTAAGATTTGAATTTATTATGTATATGAAGATCTTAAA |
| | 176044399 | ATTTAAGCCATTAGCTAAAGAAACTATTGGAGGAGATCTT |
| | | TTATTGTATTCTGTCAGCTGTTTAACTCAGTAATGA (SEQ |
| | | ID NO: 3821) |
| RNFT1 | chr17:58039977- | GAATTTCTCTTGGAATTGGGCTGCTAACAACTTTTATGTAT |
| | 58039901 | GCAAACAAAAGCATTGTAAATCAGGTTTTTCTAAGA (SEQ |
| | | ID NO: 3822) |
| RPA1 | chr17:1745069- | ACGTCAGCTATCAGTTTAAGCATTACTTCTATGCCTAGTTT |
| | 1745127 | GCTGAGACTTTATAATGA (SEQ ID NO: 3823) |
| RPS6KB2 | chr11:67196453- | GACGCATGTCCCCTTGCCGAGTTGAGGGCAGCTGGCCTAG |
| | 67196493 | A (SEQ ID NO: 3824) |
| SAMD4A | chr14:55115465- | ATGTGATGGGAAGTCTCTGGAAGAGTTGAGAAGGAGAAT |
| | 55115566 | GAAGGCGCTTCATTGACCCTTGAAAATGACCACTCTGAAT |
| | | GCGGCACAGAGAGTAATGAAAGA (SEQ ID NO: 3825) |
| SAR1A | chr10:71926149- | TGCATCTAAGTGGCATTCTGATTCACATTATTGATAAGACT |
| | 71926032 | GATTTCCTAGAGTIGTTCTTCACTGGATGACAGCAGTCGTA |
| | | TGTCTAGGGAATGTGAATGAACCGCTGCCTGGAGGA (SEQ |
| | | ID NO: 3826) |
| SCO1 | chr17:10594966- | AGAAAGGATTTGAACTTGGCCTTCATGTATCAACTAAGTT |
| | 10594907 | AATCGAGCCTTGAATTGAGA (SEQ ID NO: 3827) |
| SEC24A | chr5:134013731- | AGACCGGGTCTCTCGTTGTCACCCAGGTTAGAGTGCAGTT |
| | 134013842 | CCATGATCATAGCTCACTGCAGCCTTGAACTCTTGGGCTC |
| | | AAGCAGTCCTCCTGCCTCAGCCTCCAGACAGA (SEQ ID NO: |
| | | 3828) |
| SERGEF | chr11:18031686- | GTGTCTTCAAAAACAAACATATTTAAAAGATTTTACTTCTC |
| | 18031622 | ATCTCCAGGAAGAACCAGCTAGGA (SEQ ID NO: 3829) |
| SH3YL1 | chr2:224920-224868 | GTAACAGAAATGAATATAAGCTCTATCCTGGACTTTCCAG |
| | | CTATCATGAGAGA (SEQ ID NO: 3830) |
| SKA2 | chr17:57196856- | AAAAATCCAGTTACACTCTTAAAGGAATTGTCAGTGATAA |
| | 57196757 | AGTCTCGATATCAAACTTTGTATGCCCGCTTTAAACCAGTT |
| | | GCTGTTGAGCAGAAAGAGA (SEQ ID NO: 3831) |
| SMYD3 | chr1:246394576- | CTATATCAGAAAAGCAGGAAACCAGAGAAAATATACCTA |
| | 246394501 | TTTGAAAGTGGCATGTCAGCTGGGATGAGAGAGAAGA |
| | | (SEQ ID NO: 3832) |
| SNAP23 | chr15:42805372- | TATTGGAATATGACAGGGAAGATGAATTCACTATGA (SEQ |
| | 42805407 | ID NO: 3833) |
| SNHG16 | chr17:74554456- | AGGCCTTTCTTTGTTTGGCATCTGCAGAGACGGTGAAAAG |
| | 74554545 | CAGAGCTCCAGGTTGAAGGATCAGAGTAATAGATGGAGC |
| | | CCTTAACATGA (SEQ ID NO: 3834) |
| SNX7 | chr1:99204216- | AGTTTGCAAAGGAAGGAAAGGAGCAGAGACTTGAATGAG |
| | 99204359 | CAGAAAATCATTTCAGGGCCTGTTCTCTATGTCCTTGCTAT |
| | | CCCTGTCTTCTGTAGCTATTCTGAAACCATCAACAAAGGA |
| | | GCACACCATTCCATCAGCAAAAGA (SEQ ID NO: 3835) |
| SPATA5 | chr4:123901321- | AACCTTTATATAAATGGAATCATACTGTATACAACCTTTTG |
| | 123901384 | GAATTAGCTTTTTTCACATATGA (SEQ ID NO: 3836) |
| SPIDR | chr8:48185929- | GTATTCAGTAGAAGCAGATGAACAGCCAGATGAAGAGAT |
| | 48186042 | GGATAGAGCAAGACATGGACATTATAAAGGAATTCAATA |
| | | GAAGCACATGAACGGCCAGATGAAGAGATGGATAGA |
| | | (SEQ ID NO: 3837) |
| SPRYD7 | chr13:50492357- | GTGTGGTTGTACGTGCCTGTAGTCCCAGCTACTTGAGAGG |
| | 50492229 | CTGAGCTGAGAGGATCTCTTGAGCCGGGGAGGTCAAGTCT |
| | | CCTGTGAGCAGTGATCATCGTGCCGCTGCACTCCAGCCTT |
| | | GGCACCAGA (SEQ ID NO: 3838) |
| SRGAP1 | chr12:64319388- | TCACAGATACCACGTGTTAATATCTAAAGTAGAAAAAGGA |
| | 64319457 | ATAAAGCAAAGGAGGACAAAAAGAAAAGGA (SEQ ID NO: |
| | | 3839) |
| STAT1 | chr2:191843332- | GTTTGTTATCTGCAGATCAAGGATGTGAGTCAATGTAATC |
| | 191843254 | TGCAACCCGTTCTTGGAAGGAATCACATTTCCCACAGGA |
| | | (SEQ ID NO: 3840) |
| STXBP6 | chr14:25411028- | GTGGTCCCTGAGTTAAGAACATGCAATGGCACTCTCTCAA |
| | 25410930 | GGAGAGGAAGGAGCCAAAGAAGAAAGAGGTCCAAAGCA |
| | | GAAAAGAGCAGACAGCTAAGA (SEQ ID NO: 3841) |
| SUPT20H | chr13:37585794- | TTGAAGACGATAATTCTAACTTCCTGTCAGTTGAAGACGA |
| | 37585696 | TAATTCTAACTTCCTGTCAGTTGAAGACGATAATTCTAACT |
| | | TCACACTTAATTAAAAGA (SEQ ID NO: 3842) |
| TAF2 | chr8: 120771346- | GAAGATGATCACCTTGCCAAGGAAGCATCATGTAATATAT |
| | 120771264 | CAGCTCATCAGCAGGGAGTGAAGAGGAAGTCTGATACAC |
| | | CACTGGGGTCCCCACTAGAACCTGGTCAAATACTGGAGAA |
| | | GAATGAGGATAGCAGTAAAGTCAAACTCAAAATCAGA |
| | | (SEQ ID NO: 3843) |
| TAF2 | chr8:120757276- | TTTTGAGATCCACCAAATATGTCATTGTTGCCAGTCTTCTT |
| | 120757121 | TCCCAAGATGTATGGATAGTTTTTAATGTCTCATAAATATG |
| | | A (SEQ ID NO: 3844) |
| TBCID15 | chr12:72278640- | TTTGACAGACCTGAAATCAATCAAGCAAAACAAAGAGGG |
| | 72278801 | TATGGGCTGGTCCTATTTGGTATTCTGTCTAAAGGATGACG |
| | | TCGTTCTCCCTGCTCTACACTTTCATCAAGGAGATAGCAAA |
| | | CTACTGATTGAATCTCTTGAAAAATATGTGGTATTGTGTGA |
| | | (SEQ ID NO: 3845) |
| TCF12 | chr15:57227695- | GTTTTTGGGGAACAGGTGGTATTTGGTGACATGA (SEQ ID |
| | 57227728 | NO: 3846) |
| TJP2 | chr9:71792959- | GGATTGGTGTCTCTATCATCCAGCTGGCCATTAAACAACC |
| | 71793045 | AAAGCTTCATCATCCTAGATAACCTGTGAGCTCTCAGAGG |
| | | AGACAGA (SEQ ID NO: 3847) |
| TMEM189- | chr20:48713357- | GAGTAAAAGTCCCTCGCAATTTCCGACTGTTGGAAGAACT |
| UBE2V1 | 48713209 | CGAAGAAGGCCAGAAAGGAGTAGGAGATGGCACAGTTAG |
| | | CTGGGGTCTAGAAGATGACGAAGACATGACACTTACAAG |
| | | ATGGACAGGGATGATAATTGGGCCTCCAAGA (SEQ ID NO: |
| | | 3848) |
| TMEM214 | chr2:27260130- | CCATCCTAGATCTGAGATTTGCAACCTGGAAGTTCAAGA |
| | 27260168 | (SEQ ID NO: 3849) |
| TNS3 | chr7:47337036- | GCAGGCCCACCCATGAAACATACACGACACCACAGAGAC |
| | 47336903 | CTCCCTGAAGGTCCCTCAACTGCATGGACATGTAGTTCTTC |
| | | CAGCCAAGCAGAGGGATCCCGGCCAGGTCCCCACTGATCC |
| | | AGTTTGCAAAAAGA (SEQ ID NO: 3850) |
| TOE1 | chr1:45807382- | GTTTATGGGGAACAGGTGGTGTTTGGTTAAATGA (SEQ ID |
| | 45807415 | NO: 3851) |
| TRAF3 | chr14:103356688- | CACCAATACATTATTATGAAGTCAGTACAGAGAGATTGGC |
| | 103356763 | ATCTTAGTATTTTCTGAGGAAGAGAACAGCCAAAGA (SEQ |
| | | ID NO: 3852) |
| TSPAN2 | chr1:115601892- | GTTTTGTGGGGAACAGGTGGTGTTTGGTTACATGA (SEQ ID |
| | 115601858 | NO: 3853) |
| TUBE1 | chr6:112405449- | AGTGGTTGGTGATGGTGGAAGTATTTCCAAGGGAAAAATA |
| | 112405392 | TGTTCTTTAAAAGCACGA (SEQ ID NO: 3854) |
| TYW5 | chr2:200813345- | TGACAGCATGAACTGTCAGAAGCTTTGAGTTCAAGCATCT |
| | 200813295 | TGGGAGCAAGA (SEQ ID NO: 3855) |
| UBE2V1 | chr20:48713357- | GAGTAAAAGTCCCTCGCAATTTCCGACTGTTGGAAGAACT |
| | 48713209 | CGAAGAAGGCCAGAAAGGAGTAGGAGATGGCACAGTTAG |
| | | CTGGGGTCTAGAAGATGACGAAGACATGACACTTACAAG |
| | | ATGGACAGGGATGATAATTGGGCCTCCAAGA (SEQ ID NO: |
| | | 3856) |
| URGCP | chr7:43945050- | GCTTTGGGGCAGTGGTCATTTCCGGGACCAGGCCTTTTCAT |
| | 43944971 | TGCCAGCTGACTACCCAGCACTTTGAGCTCATGAATAGA |
| | | (SEQ ID NO: 3857) |
| XRN2 | chr20:21307793- | GTGGTTTGAATTGAGAAGGGAAGTATAGCAAAAGCTTGA |
| | 21307903 | GAAAGCCTTACCGTCTGGAGTTTGGACTGTATCCTATAGG |
| | | CAATGAGTAGTCATGAAAATGATTTGAGAGGA (SEQ ID |
| | | NO: 3858) |
| XRN2 | chr20:21326472- | CCATCAACAACTCTTAGCTGAAAGAGGGATAAGGCCCAA |
| | 21326525 | GCAAGGATAGAGAGA (SEQ ID NO: 3859) |
| ZNF232 | chr17:5012080- | GTGAGAGACTTTGCCTGTTTCATCACTCATAAAATTAGGA |
| | 5012041 | (SEQ ID NO: 3860) |
| ZNF680 | chr7:64002295- | GCAGAACTGGCCGTGAACTGTGGCTCAGGGAGCTGGAACT |
| | 64002108 | GAGTCATCGAACTGCTTCAGAAACCACAGTAAAGGACAA |
| | | GGTCTGCAGGCCTGCCTGCGTGGCTATAAATGGCTGTCTT |
| | | CCTCCAGGCCTCTGGAAGGGCACGGTCTCTCCCAGACTGT |
| | | GGCTGGGAGGAGTTTGGGATGATTAGAGA (SEQ ID NO: |
| | | 3861) |

[2152] Diseases or disorders associated with expression of an aberrant gene product for certain genes described herein are listed in Table 15, wherein contacting a patient cell with a compound described herein or administering to a subject in need thereof a compound described herein has been demonstrated to modulate the expression of associated RNA transcripts and are thus expected to be useful in preventing or ameliorating a disease or disorder caused by expression of an aberrant gene product.

TABLE 15
Diseases or disorders associated with expression of an aberrant gene product for certain genes.

| Gene | GeneID | Example(s) of Associated Disease or Disorder |
|---|---|---|
| ABCC3 | 8714 | Cholestasis, Colorectal Neoplasms, Peripheral Nervous System Diseases |
| ADAM17 | 6868 | Blister, Inflammatory Skin and Bowel Disease, Neonatal |
| ANXA11 | 311 | Sarcoidosis |
| APLP2 | 334 | Nerve Degeneration, Myocardial Ischemia |
| ASPH | 444 | Ectopia Lentis, Spontaneous Filtering Blebs, and Craniofacial Dysmorphism |
| ATXN1 | 6310 | Spinocerebellar Ataxia 1, Spinocerebellar Ataxias |
| AXIN1 | 8312 | Carcinoma, Hepatocellular, Caudal Duplication Anomaly |
| BECN1 | 8678 | Status Epilepticus, Colonic Neoplasms, Lewy Body Disease, Myocardial |
| | | Infarction, Lung Neoplasms |
| BHMT2 | 23743 | Cleft Lip, Cleft Palate |
| C11orf30 | 56946 | Dermatitis, Atopic, Breast Neoplasms, Polycystic Ovary Syndrome |
| C11orf73 | 51501 | Stomach Neoplasms, Melanoma, Disease Progression |
| CASP7 | 840 | Myocardial Reperfusion Injury, Vitiligo, Breast Neoplasms, Leukemia, |
| | | Myeloid, Acute |
| CDH13 | 1012 | Lung Neoplasms, Carcinoma, Hepatocellular, Prostatic Neoplasms, Carcinoma, |
| | | Non-Small-Cell Lung, Esophageal Neoplasms, Amphetamine-Related |
| | | Disorders, Substance-Related Disorders, Barrett Esophagus |
| CHEK1 | 1111 | Glomerulonephritis, IGA, Peripheral Nervous System Diseases |
| CRISPLD2 | 83716 | Neurotoxicity Syndromes, Lung Diseases, Liver Diseases |
| DCAF17 | 80067 | Woodhouse Sakati syndrome |
| DHFR | 1719 | Megaloblastic Anemia due to Dihydrofolate Reductase Deficiency, |
| | | Osteosarcoma, Autistic Disorder, Folic Acid Deficiency, Neoplasm Metastasis, |
| | | Colorectal Neoplasms, Nervous System Diseases, Anemia, Megaloblastic, |
| | | Drug-Related Side Effects and Adverse Reactions, Metabolism, Inborn Errors, |
| | | Infertility, Female, Abortion, Spontaneous, Pancytopenia |
| DIAPH3 | 81624 | Neuropathy, auditory neuropathy, benign epilepsy with centrotemporal spikes, |
| | | prostate cancer, pancreatitis, prostatitis, sensorineural hearing loss |
| DENND5A | 23258 | Stomatitis |
| DNAJC13 | 23317 | Parkinson Disease |
| DOCK1 | 1793 | Substance-Related Disorders |
| DYRK1A | 1859 | Mental Retardation, Autosomal Dominant 7 |
| EIF2B3 | 8891 | Leukoencephalopathy with Vanishing White Matter, Vanishing White Matter |
| | | Leukodystrophy with Ovarian Failure |
| ENAH | 55740 | Glomerulonephritis, IGA |
| EP300 | 2033 | Rubinstein-Taybi Syndrome, Endometrial Neoplasms, Carcinoma, Transitional |
| | | Cell, Esophageal Squamous Cell Carcinoma, Urinary Bladder Neoplasms, |
| | | Colorectal Neoplasms, Carcinoma, Adenoid Cystic, Small Cell Lung |
| | | Carcinoma, Colon Carcinoma, Rubinstein-Taybi Syndrome 2 |
| ERCC1 | 2067 | Cerebrooculofacioskeletal Syndrome 4, Carcinoma, Non-Small-Cell Lung, |
| | | Stomach Neoplasms, Neoplasms, Neoplasm Metastasis, Melanoma, Testicular |
| | | Neoplasms, Peripheral Nervous System Diseases, Adenocarcinoma of lung. |
| | | Nasopharyngeal carcinoma, Uterine Cervical Ncoplasms, Arsenic Poisoning, |
| | | Neoplasms, Germ Cell and Embryonal |
| ERLIN2 | 11160 | Intellectual Disability, Spastic Paraplegia 18, Autosomal Recessive |
| ERRFI1 | 54206 | Endometriosis, Polycystic Ovary Syndrome |
| EVC | 2121 | Ellis-Van Creveld Syndrome, Weyers acrofacial dysostosis |
| FAM126A | 84668 | Leukodystrophy, Hypomyelinating, 5, Substance-Related Disorders, |
| | | Intellectual Disability, Peripheral Nervous System Discases |
| FAM13A | 10144 | Pulmonary Disease, Chronic Obstructive, Idiopathic Pulmonary Fibrosis |
| FAM198B | 51313 | Glomerulonephritis, IGA |
| FBN2 | 2201 | Congenital contractural arachnodactyly, Colorectal Neoplasms |
| FHOD3 | 80206 | Substance-Related Disorders |
| GALC | 2581 | Krabbe discasc, leukodystrophy, metachromatic leukodystrophy, lipid storage |
| | | disease, infantile krabbe disease, chron's disease, neuropathy, neuronitis, motor |
| | | neuron disease, hereditary spastic paraplegia, cerebritis, peripheral neuropathy, |
| | | paraplegia, spasticity, Gaucher's disease, blindness, lysosomal storage disease, |
| | | gangliosidosis, farber lipogranulomatosis, lipogranulomatosis, open-angle |
| | | glaucoma, primary open angle glaucoma, glaucoma, multiple sclerosis, |
| | | hepatitis, squamous cell carcinoma, hematopoietic stem cell transplantation, |
| | | late-infantile or juvenile krabbe disease, adult krabbe disease |
| GGCT | 79017 | Meningioma, osteosarcoma, tuberculosis, gestational diabetes, leukemia, |
| | | eczema, eczema herpeticum, myoblastoma |
| GOLGA4 | 2803 | Arsenic Poisoning, Prostatic Neoplasms, Skin Diseases |
| GPSM2 | 29899 | Chudley-Mccullough syndrome |
| GULP1 | 51454 | Thyroid Diseases |
| HLTF | 6596 | Colon cancer, adenocarcinoma, colorectal cancer, adenoma, gastric cancer, |
| | | squamous cell carcinoma, cervical squamous cell carcinoma, cervical |
| | | adenocarcinoma, endometrial adenocarcinoma, cervicitis, gastric cardia |
| | | adenocarcinoma, cervical cancer, esophagitis, laryngeal squamous cell |
| | | carcinoma, laryngitis, esophageal squamous cell carcinoma |
| HMGA2 | 8091 | Neoplasms, Lipomatosis, Multiple, Birth Weight |
| HNMT | 3176 | Asthma, Urticaria, Rhinitis, Drug Hypersensitivity, Susceptibility to Asthma |
| HPS1 | 3257 | Albinism with hemorrhagic diathesis and pigmented reticuloendothelial cells |
| HSD17B4 | 3295 | Bifunctional peroxisomal enzyme deficiency, Gonadal dysgenesis XX type |
| | | deafness, Zellweger Syndrome, Peroxisomal Disorders, Spasms, Infantile |
| HTT | 3064 | Huntington Disease, Movement Disorders, Manganese Poisoning, Cadmium |
| | | Poisoning |
| IVD | 3712 | Acidemia, isovaleric |
| KDM6A | 7403 | Esophageal Squamous Cell Carcinoma, Urinary Bladder Neoplasms, |
| | | Neoplasms, Carcinoma, Adenoid Cystic, Carcinoma, Transitional Cell, |
| | | KABUKI SYNDROME 2 |
| MED13L | 23389 | Transposition of the Great Arteries, Dextro-Looped 1, Intellectual Disability |
| MFN2 | 9927 | Charcot-Marie-Tooth Disease, Axonal, Type 2A2, Hereditary Motor And |
| | | Sensory Neuropathy VI, Charcot-Marie-Tooth Disease, Cardiomegaly |
| MRPS28 | 28957 | Breast Neoplasms |
| MYLK | 4638 | Aortic Aneurysm, Familial Thoracic 7, Acute Lung Injury, Pneumonia, |
| | | Neoplasm Metastasis, Glaucoma, Gastrointestinal Diseases, Vascular Diseases, |
| | | Hypersensitivity, Brain Edema, Neoplasm Invasiveness, Glioma, |
| | | Hypercholesterolemia |
| NGF | 4803 | Neuropathy, Hereditary Sensory And Autonomic, Type V, Inflammation, |
| | | Cystitis, Hyperalgesia, Urinary Bladder, Overactive, Hereditary Sensory and |
| | | Autonomic Neuropathies, Glomerulonephritis, Heroin Dependence, Peripheral |
| | | Nervous System Diseases, Epilepsy, Tonic-Clonic, Hyperkinesis, Neurogenic |
| | | Inflammation, Lewy Body Discasc, Kidney Failure, Chronic, Nerve |
| | | Degeneration, Lung Injury, Seizures, Bronchial Hyperreactivity, Nervous |
| | | System Diseases, Renal Insufficiency, Chronic, Skin Ulcer, Corneal Ulcer, |
| | | Parkinsonian Disorders, Neurodegenerative Diseases, Amnesia, Status |
| | | Epilepticus, Parkinson Disease, Cocaine-Related Disorders, Neurobehavioral |
| | | Manifestations, Nephritis, Interstitial |
| NT5C2 | 22978 | Precursor Cell Lymphoblastic Leukemia-Lymphoma, Recurrence, Spastic |
| | | Paraplegia 45, Autosomal Recessive |
| OSMR | 9180 | Amyloidosis IX, Glomerulonephritis, IGA, Carcinoma, Non-Small-Cell Lung, |
| | | Amyloidosis, Primary Cutaneous |
| OXCT1 | 5019 | Succinyl-CoA: 3-oxoacid CoA transferase deficiency, Osteoporosis |
| PAPD4 | 167153 | Sleeping sickness |
| PCM1 | 5108 | Schizophrenia, Thyroid cancer, papillary |
| PDXDC1 | 23042 | Carcinoma, Renal Cell, Glomerulonephritis, IGA, Carboxy-lyase activity, |
| | | pyridoxal phosphate binding |
| PIGN | 23556 | Multiple Congenital Anomalies-Hypotonia-Seizures Syndrome 1 |
| PIK3CD | 5293 | Activated PI3K-delta Syndrome, Lymphoma, Large B-Cell, Diffuse, Prostatic |
| | | Neoplasms |
| PIK3R1 | 5295 | Short Syndrome, Insulin Resistance, Carcinoma, Mammary Neoplasms, |
| | | Experimental, Burkitt Lymphoma, Mammary Neoplasms, Animal, Autosomal |
| | | Recessive Agammaglobulinemia 7 |
| PIKFYVE | 200576 | Corneal Dystrophy, Fleck |
| PITPNB | 23760 | Obesity |
| PLEKHA1 | 59338 | Macular Degeneration, Age-Related, 1 |
| PLSCR1 | 5359 | Influenza, Human |
| POMT2 | 29954 | Muscular Dystrophy-Dystroglycanopathy (Limb-Girdle), Type C, 2, Muscular |
| | | Dystrophy-Dystroglycanopathy (Congenital with Mental Retardation), Type B, |
| | | 2, Muscular Dystrophy-Dystroglycanopathy (Congenital with Brain and Eye |
| | | Anomalies), Type A, 2, Walker-Warburg Syndrome, Congenital muscular |
| | | dystrophy |
| PPARG | 5468 | Obesity, Familial Partial Lipodystrophy Type 3, Hypertension, Diabetes |
| | | Mellitus, Type 2, Inflammation, Acute Lung Injury, Acute Kidney Injury, |
| | | Diabetes Mellitus, Experimental, Insulin Resistance, Diabetes Mellitus, |
| | | Atherosclerosis, Colonic Neoplasms, Colorectal Neoplasms, Thyroid |
| | | Neoplasms, Alzheimer Disease, Adenocarcinoma, Stomach Neoplasms, |
| | | Dyslipidemias, Pancreatic Neoplasms, Melanoma, Lipodystrophy, Familial |
| | | Partial, Crohn Disease, Metabolic Diseases, Carcinoma, Hepatocellular, Colon |
| | | Carcinoma, Psoriasis, Ischemia, Reperfusion Injury, Ostcoarthritis, Glioma, |
| | | Liver Neoplasms, Polycystic Kidney, Autosomal Dominant, Leukostasis, |
| | | Thyroid cancer, follicular, Lipidoses, Glomerulonephritis, Nerve Degeneration, |
| | | Pituitary ACTH Hypersecretion, Carotid Intimal Medial Thickness 1, Barrett |
| | | Esophagus, Lymphoma, T-Cell, Chronobiology Disorders, Obesity, Morbid |
| PPHLN1 | 51535 | Nervous system disorders, for example, interacts with synphilin-1, mutations of |
| | | which are implicated in Parkinson's disease, gastric cancer, ichthyosis |
| PRPF31 | 26121 | Retinitis Pigmentosa 11, Retinitis Pigmentosa |
| PRSS23 | 11098 | Melanoma |
| PSMA4 | 5685 | Carcinoma, Mammary Neoplasms, Experimental, HIV Infections, Mammary |
| | | Neoplasms, Animal, Liver Neoplasms |
| PXK | 54899 | Lupus Erythematosus, Systemic, Arthritis, Rheumatoid |
| RAF1 | 5894 | Noonan Syndrome 5, Noonan Syndrome, Leopard syndrome, 2, Leopard |
| | | Syndrome, Glioma, Cardiomyopathy, Hypertrophic, Carcinoma, Non-Small- |
| | | Cell Lung, Lung Neoplasms, Breast Neoplasms, Liver Neoplasms, Kidney |
| | | Neoplasms, Cardiomyopathy, Dilated, Hyperalgesia |
| RARS2 | 57038 | Pontocerebellar Hypoplasia Type 6 |
| RFWD2 | 64326 | Autistic Disorder |
| RPA1 | 6117 | Chloracne |
| RPS10 | 6204 | Diamond-Blackfan Anemia 9 |
| RPS6KB2 | 6199 | Breast Neoplasms |
| SAMD4A | 23034 | Substance-Related Disorders |
| SCO1 | 6341 | Cytochrome-c Oxidase Deficiency, Mitochondrial Discascs |
| SLC12A2 | 6558 | Hypertension, Epilepsy, Epilepsy, Temporal Lobe, Carcinoma, Mammary |
| | | Neoplasms, Experimental, Glucose Intolerance, Prostatic Neoplasms, |
| | | Movement Disorders, Cardiovascular Diseases, Mammary Neoplasms, Animal |
| SMYD3 | 64754 | Amphetamine-Related Disorders |
| SNAP23 | 8773 | Myocardial Ischemia |
| SPATA5 | 166378 | Schizophrenia |
| STAT1 | 6772 | Susceptibility ToMycobacterial and Viral Infections, Autosomal Recessive, |
| | | Candidiasis, Familial, 7, Arthritis, Experimental, Carcinoma, Hepatocellular, |
| | | Mycobacterium Infections, Candidiasis, Chronic Mucocutaneous, Liver |
| | | Cirrhosis, Arthritis, Rheumatoid, Cytomegalovirus Infections, Hearing Loss, |
| | | Disease Progression, Mycobacterium Infections, Nontuberculous, Influenza, |
| | | Human |
| STRN3 | 29966 | Cerebritis, cerebral cavernous malformation, cavernous malformation, cerebral |
| | | cavernous malformations 3, neuronitis |
| STXBP6 | 29091 | Autistic Disorder |
| TAF2 | 6873 | Mental Retardation, Autosomal Recessive 40, Intellectual Disability |
| TCF12 | 6938 | Craniosynostosis 3, Craniosynostoses |
| TCF4 | 6925 | Pitt-Hopkins syndrome, Seizures, Peripheral Nervous System Diseases, |
| | | Craniofacial Abnormalities, Heart Diseases, Microcephaly, Liver Neoplasms |
| TIAM1 | 7074 | Amyotrophic lateral sclerosis 1 |
| TJP2 | 9414 | Hypercholanemia, Familial, Hearing Loss, Cholestasis, Intrahepatic |
| TRAF3 | 7187 | Susceptibility to Herpes Simplex Encephalitis, 3 |
| VPS29 | 51699 | Down syndrome, paraplegia |
| WNK1 | 65125 | Neuropathy, Hereditary Sensory and Autonomic, Type IIA, |
| | | Pseudohypoaldosteronism, Type IIc, Hypertension, Kidney Diseases, |
| | | Pseudohypoaldosteronism, Peripheral Nervous System Diseases |
| ZCCHC8 | 55596 | Intellectual Disability |

[2153] It will be appreciated that, although specific embodiments of the invention have been described herein for purposes of illustration, the invention described herein is not to be limited in scope by the specific embodiments herein disclosed. These embodiments are intended as illustrations of several aspects of the invention. Any equivalent embodiments are intended to be within the scope of this invention. Indeed, various modifications of the invention in addition to those shown and described herein will become apparent to those skilled in the art from the foregoing description, which modification also intended to be within the scope of this invention.

[2154] All references cited herein are incorporated herein by reference in their entirety and for all purposes to the same extent as if each individual publication or patent or patent application was specifically and individually indicated to be incorporated by reference in its entirety for all purposes.

What is claimed is:

1. A method for producing a mature mRNA transcript comprising an iExon, the method comprising contacting a pre-mRNA transcript with a compound of Formula (I) or a form thereof, wherein the pre-mRNA transcript comprises two exons and an intron, wherein one exon is upstream of the intron and the other exon is downstream of the intron, wherein the intron comprises in 5′ to 3′ order: a first 5′ splice site, a first branch point, a first 3′ splice site, an endogenous intronic recognition element for splicing modifier (iREMS), a second branch point, and a second 3′ splice site, wherein the iREMS comprises an RNA sequence GAgurngn (SEQ ID NO: 2), wherein r is adenine or guanine and n is any nucleotide, wherein the pre-mRNA transcript is a pre-mRNA transcript of a gene that is selected from ABCB8, ABCC3, ADAM17, ADCY3, AGPAT4, ANKRA2, ANXA11, APIP, APPL2, ARHGAP1, ARL15, ASAP1, ASPH, ATAD2B, ATXN1, BECN1, BHMT2, BICD1, BTN3A1, C11orf30, C11orf73, C12orf4, C14orf132, C8orf44, C8orf44-SGK3, C8orf88, CASC3, CASP7, CCDC122, CDH13, CECR7, CENPI, CEP112, CEP192, CHEK1, CMAHP, CNRIP1, COPS7B, CPSF4, CRISPLD2, CRYBG3, CSNK1E, CSNK1G1, DCAF17, DCUN1D4, DDX42, DENND1A, DENND5A, DGKA, DHFR, DIAPH3, DNAJC13, DNMBP, DOCK1, DYRK1A, EIF2B3, ENAH, ENOX1, EP300, ERC1, ERLIN2, ERRFI1, EVC, FAF1, FAIM, FAM126A, FAM13A, FAM162A, FAM174A, FBN2, FER, FHOD3, FOCAD, GALC, GCFC2, GGACT, GLCE, GOLGA4, GOLGB1, GPSM2, GULP1, GXYLT1, HDX, HLTF, HMGA2, HNMT, HSD17B12, HSD17B4, HTT, IFT57, IVD, KDM6A, KIAA1524, KIAA1715, LETM2, LOC400927, LRRC42, LUC7L3, LYRM1, MB21D2, MCM10, MED13L, MEDAG, MEMO1, MFN2, MMS19, MRPL45, MRPS28, MTERF3, MYCBP2, MYLK, MYOF, NGF, NREP, NSUN4, NT5C2, OSMR, OXCT1, PAPD4, PCM1, PDE7A, PDS5B, PDXDC1, PIGN, PIK3CD, PIK3R1, PIKFYVE, PITPNB, PLEKHA1, PLSCR1, PMS1, POMT2, PPARG, PPIP5K2, PPP1R26, PRPF31, PRSS23, PSMA4, PXK, RAF1, RAPGEF1, RARS2, RBKS, RERE, RFWD2, RPA1, RPS10, SAMD4A, SAR1A, SCO1, SEC24A, SENP6, SERGEF, SGK3, SLC12A2, SLC25A17, SLC44A2, SMYD3, SNAP23, SNHG16, SNX7, SOS2, SPATA5, SPIDR, SPRYD7, SRGAP1, SRRM1, STAT1, STXBP6, SUPT20H, TAF2, TASP1, TBC1D15, TCF12, TCF4, TIAM1, TJP2, TMC3, TMEM214, TNRC6A, TNS3, TOE1, TRAF3, TSPAN2, TTC7B, TYW5, UBAP2L, URGCP, VAV2, WDR27, WDR37, WDR91, WNK1, XRN2, ZCCHC8, ZFP82, ZNF138, ZNF232 or ZNF37BP, and wherein Formula (I) is: [chemical structure]
wherein:
w₁ and w₅ are independently C—Rₐ or N;
w₂ is C—R_{b} or N;
w₃, w₄ and w₇ are independently C—R₁, C—R₂, C—Rₐ or N;
w₆ is C—R₁, C—R₂, C—R_{c} or N;
wherein one of w₃, w₄, w₆ and w₇ is C—R₁ and one other of w₃, w₄, w₆ and w₇ is C—R₂, provided that,
when w₃ is C—R₁, then w₆ is C—R₂ and w₄ and w₇ are independently C—Rₐ or N; or,
when w₃ is C—R₂, then w₆ is C—R₁ and w₄ and w₇ are independently C—Rₐ or N; or,
when w₄ is C—R₁, then w₇ is C—R₂ and w₃ is C—Rₐ or N and w₆ is C—R_{c} or N; or,
when w₄ is C—R₂, then w₇ is C—R₁ and w₃ is C—Rₐ or N and w₆ is C—R_{c} or N; and,
wherein any one, two or three of w₁, w₂, w₃, w₄, w₅, w₆ and w₇ may optionally be N;
R₁ is C₁₋₈alkyl, amino, C₁₋₈alkyl-amino, (C₁₋₈alkyl)₂-amino, C₁₋₈-alkoxy-C₁₋₈alkyl-amino, (C₁₋₈alkoxy-C₁₋₈alkyl)₂-amino, (C₁₋₈alkoxy-C₁₋₈alkyl)(C₁₋₈alkyl)amino, amino-C₁₋₈alkyl, C₁₋₈alkyl-amino-C₁₋₈alkyl, (C₁₋₈alkyl)₂-amino-C₁₋₈alkyl, C₁₋₈alkoxy-C₁₋₈alkyl-amino-C₁₋₈alkyl, (C₁₋₈alkoxy-C₁₋₈alkyl)₂-amino-C₁₋₈alkyl, (C₁₋₈alkoxy-C₁₋₈alkyl)(C₁₋₈alkyl)amino-C₁₋₈alkyl, amino-C₁₋₈alkyl-amino, (amino-C₁₋₈alkyl)₂-amino, (amino-C₁₋₈alkyl)(C₁₋₈alkyl)amino, C₁₋₈alkyl-amino-C₁₋₈alkyl-amino, (C₁₋₈alkyl-amino-C₁₋₈alkyl)₂-amino, (C₁₋₈alkyl-amino-C₁₋₈alkyl)(C₁₋₈alkyl)amino, (C₁₋₈alkyl)₂-amino-C₁₋₈alkyl-amino, [(C₁₋₈alkyl)₂-amino-C₁₋₈alkyl](C₁₋₈alkyl)amino, amino-C₁₋₈alkoxy, C₁₋₈alkyl-amino-C₁₋₈alkoxy, (C₁₋₈alkyl)₂-amino-C₁₋₈alkoxy, C₁₋₈alkoxy-C₁₋₈alkyl-amino-C₁₋₈alkoxy, C₁₋₈alkoxy-C₁₋₈alkyl-amino-C₁₋₈alkoxy, (C₁₋₈alkoxy-C₁₋₈alkyl)(C₁₋₈alkyl)amino-C₁₋₈alkoxy, amino-C₂₋₈alkenyl, C₁₋₈alkyl-amino-C₂₋₈alkenyl, (C₁₋₈alkyl)₂-amino-C₂₋₈alkenyl, amino-C₂₋₈alkynyl, C₁₋₈alkyl-amino-C₂₋₈alkynyl, (C₁₋₈alkyl)₂-amino-C₂₋₈alkynyl, halo-C₁₋₈alkyl-amino, (halo-C₁₋₈alkyl)₂-amino, (halo-C₁₋₈alkyl)(C₁₋₈alkyl)amino, hydroxy-C₁₋₈alkyl, hydroxy-C₁₋₈alkoxy-C₁₋₈alkyl, hydroxy-C₁₋₈alkyl-amino, (hydroxy-C₁₋₈alkyl)₂-amino, (hydroxy-C₁₋₈alkyl)(C₁₋₈alkyl)amino, hydroxy-C₁₋₈alkyl-amino-C₁₋₈alkyl, (hydroxy-C₁₋₈alkyl)₂-amino-C₁₋₈alkyl, (hydroxy-C₁₋₈alkyl)(C₁₋₈alkyl)amino-C₁₋₈alkyl, hydroxy-C₁₋₈alkyl-amino-C₁₋₈alkoxy, (hydroxy-C₁₋₈alkyl)₂-amino-C₁₋₈alkoxy, (hydroxy-C₁₋₈alkyl)(C₁₋₈alkyl)amino-C₁₋₈alkoxy, hydroxy-C₁₋₈alkyl-amino-C₁₋₈alkyl-amino, (hydroxy-C₁₋₈alkyl-amino-C₁₋₈alkyl)₂-amino, (hydroxy-C₁₋₈alkyl)₂-amino-C₁₋₈alkyl-amino, (hydroxy-C₁₋₈alkyl-amino-C₁₋₈alkyl)(C₁₋₈alkyl)amino, (hydroxy-C₁₋₈alkyl)(C₁₋₈alkyl)amino-C₁₋₈alkyl-amino, [(hydroxy-C₁₋₈alkyl)₂-amino-C₁₋₈alkyl](C₁₋₈alkyl)amino, [(hydroxy-C₁₋₈alkyl)(C₁₋₈alkyl)amino-C₁₋₈alkyl](C₁₋₈alkyl)amino, heterocyclyl, heterocyclyl-C₁₋₈alkyl, heterocyclyl-C₁₋₈alkoxy, heterocyclyl-amino, (heterocyclyl)(C₁₋₈alkyl)amino, heterocyclyl-amino-C₁₋₈alkyl, heterocyclyl-C₁₋₈alkyl-amino, (heterocyclyl-C₁₋₈alkyl)₂-amino, (heterocyclyl-C₁₋₈alkyl)(C₁₋₈alkyl)amino, heterocyclyl-C₁₋₈alkyl-amino-C₁₋₈alkyl, (heterocyclyl-C₁₋₈alkyl)₂-amino-C₁₋₈alkyl, (heterocyclyl-C₁₋₈alkyl)(C₁₋₈alkyl)amino-C₁₋₈alkyl, heterocyclyl-oxy, heterocyclyl-carbonyl, heterocyclyl-carbonyl-oxy, C₃₋₁₄cycloalkyl, aryl-C₁₋₈alkyl-amino, (aryl-C₁₋₈alkyl)₂-amino, (aryl-C₁₋₈alkyl)(C₁₋₈alkyl)amino, aryl-C₁₋₈alkyl-amino-C₁₋₈alkyl, (aryl-C₁₋₈alkyl)₂-amino-C₁₋₈alkyl, (aryl-C₁₋₈alkyl)(C₁₋₈alkyl)amino-C₁₋₈alkyl, heteroaryl, heteroaryl-C₁₋₈alkyl, heteroaryl-C₁₋₈alkoxy, heteroaryl-amino, heteroaryl-C₁₋₈alkyl-amino, (heteroaryl-C₁₋₈alkyl)₂-amino, (heteroaryl-C₁₋₈alkyl)(C₁₋₈alkyl)amino, heteroaryl-C₁₋₈alkyl-amino-C₁₋₈alkyl, (heteroaryl-C₁₋₈alkyl)₂-amino-C₁₋₈alkyl or (heteroaryl-C₁₋₈alkyl)(C₁₋₈alkyl)amino-C₁₋₈alkyl;
wherein, each instance of heterocyclyl, C₃₋₁₄cycloalkyl, aryl and heteroaryl is optionally substituted with one, two or three R₃ substituents and optionally, with one additional R₄ substituent; or,
wherein, each instance of heterocyclyl, C₃₋₁₄cycloalkyl, aryl and heteroaryl is optionally substituted with one, two, three or four R₃ substituents;
R₂ is aryl, aryl-amino, aryl-amino-carbonyl, heterocyclyl, heteroaryl or heteroaryl-amino;
wherein, each instance of aryl, heterocyclyl and heteroaryl is optionally substituted with one, two or three R₆ substituents and optionally, with one additional R₇ substituent;
Rₐ is, in each instance, independently selected from hydrogen, halogen, C₁₋₈alkyl or deuterium;
R_{b} is hydrogen, halogen, C₁₋₈alkyl, C₁₋₈alkoxy or deuterium;
R_{c} is hydrogen, halogen, C₁₋₈alkyl or deuterium;
R₃ is, in each instance, independently selected from cyano, halogen, hydroxy, oxo, C₁₋₈alkyl, halo-C₁₋₈alkyl, C₁₋₈alkyl-carbonyl, C₁₋₈alkoxy, halo-C₁₋₈alkoxy, C₁₋₈alkoxy-C₁₋₈alkyl, C₁₋₈alkoxy-carbonyl, amino, C₁₋₈alkyl-amino, (C₁₋₈alkyl)₂-amino, amino-C₁₋₈alkyl, C₁₋₈alkyl-amino-C₁₋₈alkyl, (C₁₋₈alkyl)₂-amino-C₁₋₈alkyl, amino-C₁₋₈alkyl-amino, C₁₋₈alkyl-amino-C₁₋₈alkyl-amino, (C₁₋₈alkyl-amino-C₁₋₈alkyl)₂-amino, (C₁₋₈alkyl)₂-amino-C₁₋₈alkyl-amino, [(C₁₋₈alkyl)₂-amino-C₁₋₈alkyl]₂-amino, (C₁₋₈alkyl-amino-C₁₋₈alkyl)(C₁₋₈alkyl)amino, [(C₁₋₄alkyl)₂-amino-C₁₋₄alkyl](C₁₋₄alkyl)amino, C₁₋₈alkoxy-C₁₋₈alkyl-amino, (C₁₋₈alkoxy-C₁₋₈alkyl)₂-amino, (C₁₋₈alkoxy-C₁₋₈alkyl)(C₁₋₈alkyl)amino, C₁₋₈alkyl-carbonyl-amino, C₁₋₈alkoxy-carbonyl-amino, hydroxy-C₁₋₈alkyl, hydroxy-C₁₋₈alkoxy-C₁₋₈alkyl, hydroxy-C₁₋₈alkyl-amino, (hydroxy-C₁₋₈alkyl)₂-amino or (hydroxy-C₁₋₈alkyl)(C₁₋₈alkyl)amino;
R₄ is C₃₋₁₄cycloalkyl, C₃₋₁₄cycloalkyl-C₁₋₈alkyl, C₃₋₁₄cycloalkyl-amino, aryl-C₁₋₈alkyl, aryl-C₁₋₈alkoxy-carbonyl, aryl-sulfonyloxy-C₁₋₈alkyl, heterocyclyl or heterocyclyl-C₁₋₈alkyl; wherein, each instance of C₃₋₁₄cycloalkyl, aryl and heterocyclyl is optionally substituted with one, two or three R₅ substituents;
R₅ is, in each instance, independently selected from halogen, hydroxy, cyano, nitro, C₁₋₈alkyl, halo-C₁₋₈alkyl, C₁₋₈alkoxy, halo-C₁₋₈alkoxy, amino, C₁₋₈alkyl-amino, (C₁₋₈alkyl)₂-amino or C₁₋₈alkyl-thio;
R₆ is, in each instance, independently selected from halogen, hydroxy, cyano, nitro, C₁₋₈alkyl, C₂₋₈alkenyl, halo-C₁₋₈alkyl, hydroxy-C₁₋₈alkyl, C₁₋₈alkoxy, halo-C₁₋₈alkoxy, C₁₋₈alkoxy-C₁₋₈alkyl, amino, C₁₋₈alkyl-amino, (C₁₋₈alkyl)₂-amino or C₁₋₈alkyl-thio; and, R₇ is C₃₋₁₄cycloalkyl, C₃₋₁₄cycloalkyl-oxy, aryl, heterocyclyl or heteroaryl.

2. A method for modulating the amount of a mature mRNA transcript produced by a pre-mRNA transcript, the method comprising contacting the pre-mRNA transcript with a compound of Formula (I) or a form thereof, wherein the pre-mRNA transcript comprises two exons and an intron, wherein one exon is upstream of the intron and the other exon is downstream of the intron, wherein the intron comprises a RNA nucleotide sequence comprising in 5′ to 3′ order: an endogenous intronic recognition element for splicing modifier (iREMS), a first branch point, and a first 3′ splice site, wherein the iREMS comprises an RNA sequence GAgurngn (SEQ ID NO: 2), wherein r is adenine or guanine and n is any nucleotide, and wherein the pre-mRNA transcript is a pre-mRNA transcript of a gene that is selected from ABCA10, ABCB8, ABCC3, ACTA2, ADAL, ADAMTS1, ADCY3, ADD1, ADGRG6, ADH6, ADHFE1, AFF3, AGPAT4, AKAP3, ANK1, ANK3, ANKRA2, ANKRD33B, ANKRD36, AP4B1-AS1, APIP, ARHGAP1, ARHGAP12, ARHGEF16, ARID5B, ARL15, ARL9, ARMCX6, ASIC1, ATG5, ATP2A3, ATXN1, B3GALT2, B3GNT6, BCL2L15, BCYRN1, BECN1, BHMT2, BIN3-IT1, BIRC3, BIRC6, BTG2, BTN3A1, C10orf54, C11orf70, C11orf94, C12orf4, C12orf56, C14orf132, C19orf47, C1orf86, C3, C7orf31, C8orf34, C8orf44, C8orf44-SGK3, C8orf88, CA13, CA3, CACNA2D2, CACNB1, CADM1, CAND2, CASP7, CCDC122, CCDC79, CCER2, CCNF, CECR7, CELSR1, CEMIP, CENPI, CEP112, CEP170, CEP192, CFH, CHEK1, CIITA, CLDN23, CLTA, CMAHP, CNGA4, CNRIP1, CNTD1, COL11A1, COL14A1, COL15A1, COL5A1, COL5A3, COL6A6, COL8A1, COLEC12, COMP, CPA4, CPQ, CPSF4, CRISPLD2, CRLF1, CRYBG3, CRYL1, CSNK1E, CSNK1G1, CYB5R2, CYGB, CYP1B1, DAGLB, DCAF17, DCLK1, DCN, DDIT4L, DDX50, DEGS1, DEPTOR, DFNB59, DIRAS3, DLG5, DLGAP4, DNAH8, DNAJC13, DNAJC27, DNMBP, DOCK11, DYNC1I1, DYRK1A, DZIP1L, EFEMP1, EGR3, ELN, ELP4, EMX2OS, ENAH, ENPP1, EP300, ERCC1, ERCC8, ERGIC3, ERLIN2, ERRFI1, ESM1, EVC, EVC2, F2R, FAIM, FAM126A, FAM13A, FAM160A1, FAM162A, FAM174A, FAM20A, FAM46B, FAM65B, FAP, FARP1, FBLN2, FBN2, FBXL6, FCHO1, FGFR2, FGL2, FLT1, FRAS1, FSCN2, GAL3ST4, GALNT15, GATA6, GBGT1, GCNT1, GDF6, GGACT, GLCE, GNAQ, GPR183, GPR50, GPRC5A, GPRC5B, GRTP1, GUCA1B, GULP1, GXYLT1, HAPLN1, HAPLN2, HAS3, HAVCR2, HDAC5, HDX, HECTD2-AS1, HEPH, HEY1, HMGA2, HMGN3-AS1, HNMT, HOOK3, HPS1, HSPA1L, HTATIP2, IFT57, IGDCC4, IGF2R, TGFBP3, TL16, INA, TNPP5K, INTU, TQCG, ITGA11, ITGA8, ITGB8, ITIH1, TTPKA, TVD, KAT6B, KCNS1, KCNS2, KDM6A, KDSR, KIAA1456, KIAA1462, KIAA1755, KIT, KLF17, KLRG1, KMT2D, KRT7, KRTAP1-1, KRTAP1-5, L3MBTL2, LAMB2P1, LETM2, LGI2, LGR4, LHX9, LINC00472, LINC00570, LINC00578, LINC00607, LINC00678, LINC00702, LINC00886, LINC00961, LINC01011, LINC01118, LINC01204, LMOD1, LOC400927, LRBA, LRP4, LRRC32, LRRC39, LRRC42, LSAMP, LUM, LYPD1, LYRM1, MAFB, MAMDC2, MAN2A1, MAN2C1, MAPK13, MASP1, MB, MB21D2, MC4R, MCM10, MED13L, MEGF6, MFN2, MIAT, MIR612, MLLT10, MMP10, MMP24, MN1, MOXD1, MRPL45, MRPL55, MRPS28, MRVI1, MSH4, MTERF3, MXRA5, MYCBP2, NA, NAALADL2, NAE1, NAGS, NDNF, NGF, NGFR, NHLH1, NLN, NOTCH3, NOTUM, NOVA2, NOX4, NRROS, OCLN, OLR1, OSBPL10, OXCT1, OXCT2, PAIP2B, PBLD, PDE1C, PDE5A, PDGFD, PDGFRB, PDS5B, PEAR1, PHACTR3, PIGN, PIK3CD, PIK3R1, PIKFYVE, PIM2, PITPNM3, PLEK2, PLEKHA1, PLEKHA6, PLEKHH2, PLSCR1, PNISR, PODN, POLN, POLR1A, POMT2, PPARG, PPIP5K2, PPM1E, PPP1R26, PPP3CA, PRKCA, PRKG1, PRPF31, PRPH2, PRRG4, PRUNE2, PSMD6-AS2, PTGIS, PTX3, PXK, RAB30, RAB38, RAB44, RAD9B, RAF1, RAPGEF1, RARS, RARS2, RBBP8, RBKS, RDX, RERE, RFX3-AS1, RGCC, ROR1, ROR2, RPA1, RPS10, RPS6KB2, SAMD4A, SCARNA9, SEC24A, SENP6, SERGEF, SGK3, SH3YL1, SHROOM3, SIGLEC10, SKA2, SLC12A2, SLC24A3, SLC35F3, SLC39A10, SLC44A2, SLC46A2, SLC4A11, SLC6A15, SLC7A11, SLC9A3, SLIT3, SMG1P3, SMTN, SNED1, SNX7, SORBS2, SORCS2, SOX7, SPATA18, SPATA5, SPDYA, SPEF2, SPIDR, SPRYD7, SRGAP1, SRRM1, STAC2, STAT4, STK32B, STRN4, STS, STXBP6, SULF1, SVEP1, SYNGR2, SYNPO, SYNPO2, SYNPO2L, TAGLN3, TANGO6, TASP1, TCF12, TCF4, TGFA, TGFB2, TGFB3, TGM2, THBS2, TIAM1, TMC3, TMEM102, TMEM119, TMEM134, TMEM189-UBE2V1, TMEM214, TMEM256-PLSCR3, TMEM50B, TNFAIP8L3, TNFRSF14, TNRC18P1, TNRC6A, TNXB, TP53AIP1, TPRG1, TRIM66, TRPC4, TSHZ2, TSPAN11, TSPAN18, TSPAN7, TSSK3, TTC7B, TUBE1, TXNIP, TYW5, URGCP, USP27X, UVRAG, VAV2, VIM-AS1, VPS41, VSTM2L, VWF, WDR27, WDR91, WISP1, WNK1, WNT10B, YDJC, ZBTB26, ZCCHC5, ZCCHC8, ZFP82, ZMIZ1-AS1, ZNF138, ZNF212, ZNF232, ZNF350, ZNF431, ZNF660, ZNF680, ZNF79, or ZNF837, and, wherein Formula (I) is: [chemical structure]
wherein:
w₁ and w₅ are independently C—Rₐ or N;
w₂ is C—R_{b} or N;
w₃, w₄ and w₇ are independently C—R₁, C—R₂, C—Rₐ or N;
w₆ is C—R₁, C—R₂, C—R_{c} or N;
wherein one of w₃, w₄, w₆ and w₇ is C—R₁ and one other of w₃, w₄, w₆ and w₇ is C—R₂, provided that,
when w₃ is C—R₁, then w₆ is C—R₂ and w₄ and w₇ are independently C—Rₐ or N; or,
when w₃ is C—R₂, then w₆ is C—R₁ and w₄ and w₇ are independently C—Rₐ or N; or,
when w₄ is C—R₁, then w₇ is C—R₂ and w₃ is C—Rₐ or N and w₆ is C—R_{c} or N; or,
when w₄ is C—R₂, then w₇ is C—R₁ and w₃ is C—Rₐ or N and w₆ is C—R_{c} or N; and,
wherein any one, two or three of w₁, w₂, w₃, w₄, w₅, w₆ and w₇ may optionally be N;
R₁ is C₁₋₈alkyl, amino, C₁₋₈alkyl-amino, (C₁₋₈alkyl)₂-amino, C₁₋₈alkoxy-C₁₋₈alkyl-amino, (C₁₋₈alkoxy-C₁₋₈alkyl)₂-amino, (C₁₋₈alkoxy-C₁₋₈alkyl)(C₁₋₈alkyl)amino, amino-C₁₋₈alkyl, C₁₋₈alkyl-amino-C₁₋₈alkyl, (C₁₋₈alkyl)₂-amino-C₁₋₈alkyl, C₁₋₈alkoxy-C₁₋₈alkyl-amino-C₁₋₈alkyl, (C₁₋₈alkoxy-C₁₋₈alkyl)₂-amino-C₁₋₈alkyl, (C₁₋₈alkoxy-C₁₋₈alkyl)(C₁₋₈alkyl)amino-C₁₋₈alkyl, amino-C₁₋₈alkyl-amino, (amino-C₁₋₈alkyl)₂-amino, (amino-C₁₋₈alkyl)(C₁₋₈alkyl)amino, C₁₋₈alkyl-amino-C₁₋₈alkyl-amino, (C₁₋₈alkyl-amino-C₁₋₈alkyl)₂-amino, (C₁₋₈alkyl-amino-C₁₋₈alkyl)(C₁₋₈alkyl)amino, (C₁₋₈alkyl)₂-amino-C₁₋₈alkyl-amino, [(C₁₋₈alkyl)₂-amino-C₁₋₈alkyl](C₁₋₈alkyl)amino, amino-C₁₋₈alkoxy, C₁₋₈alkyl-amino-C₁₋₈alkoxy, (C₁₋₈alkyl)₂-amino-C₁₋₈alkoxy, C₁₋₈alkoxy-C₁₋₈alkyl-amino-C₁₋₈alkoxy, C₁₋₈alkoxy-C₁₋₈alkyl-amino-C₁₋₈alkoxy, (C₁₋₈alkoxy-C₁₋₈alkyl)(C₁₋₈alkyl)amino-C₁₋₈alkoxy, amino-C₂₋₈alkenyl, C₁₋₈alkyl-amino-C₂₋₈alkenyl, (C₁₋₈alkyl)₂-amino-C₂₋₈alkenyl, amino-C₂₋₈alkynyl, C₁₋₈alkyl-amino-C₂₋₈alkynyl, (C₁₋₈alkyl)₂-amino-C₂₋₈alkynyl, halo-C₁₋₈alkyl-amino, (halo-C₁₋₈alkyl)₂-amino, (halo-C₁₋₈alkyl)(C₁₋₈alkyl)amino, hydroxy-C₁₋₈alkyl, hydroxy-C₁₋₈alkoxy-C₁₋₈alkyl, hydroxy-C₁₋₈alkyl-amino, (hydroxy-C₁₋₈alkyl)₂-amino, (hydroxy-C₁₋₈alkyl)(C₁₋₈alkyl)amino, hydroxy-C₁₋₈alkyl-amino-C₁₋₈alkyl, (hydroxy-C₁₋₈alkyl)₂-amino-C₁₋₈alkyl, (hydroxy-C₁₋₈alkyl)(C₁₋₈alkyl)amino-C₁₋₈alkyl, hydroxy-C₁₋₈alkyl-amino-C₁₋₈alkoxy, (hydroxy-C₁₋₈alkyl)₂-amino-C₁₋₈alkoxy, (hydroxy-C₁₋₈alkyl)(C₁₋₈alkyl)amino-C₁₋₈alkoxy, hydroxy-C₁₋₈alkyl-amino-C₁₋₈alkyl-amino, (hydroxy-C₁₋₈alkyl-amino-C₁₋₈alkyl)₂-amino, (hydroxy-C₁₋₈alkyl)₂-amino-C₁₋₈alkyl-amino, (hydroxy-C₁₋₈alkyl-amino-C₁₋₈alkyl)(C₁₋₈alkyl)amino, (hydroxy-C₁₋₈alkyl)(C₁₋₈alkyl)amino-C₁₋₈alkyl-amino, [(hydroxy-C₁₋₈alkyl)₂-amino-C₁₋₈alkyl](C₁₋₈alkyl)amino, [(hydroxy-C₁₋₈alkyl)(C₁₋₈alkyl)amino-C₁₋₈alkyl](C₁₋₈alkyl)amino, heterocyclyl, heterocyclyl-C₁₋₈alkyl, heterocyclyl-C₁₋₈alkoxy, heterocyclyl-amino, (heterocyclyl)(C₁₋₈alkyl)amino, heterocyclyl-amino-C₁₋₈alkyl, heterocyclyl-C₁₋₈alkyl-amino, (heterocyclyl-C₁₋₈alkyl)₂-amino, (heterocyclyl-C₁₋₈alkyl)(C₁₋₈alkyl)amino, heterocyclyl-C₁₋₈alkyl-amino-C₁₋₈alkyl, (heterocyclyl-C₁₋₈alkyl)₂-amino-C₁₋₈alkyl, (heterocyclyl-C₁₋₈alkyl)(C₁₋₈alkyl)amino-C₁₋₈alkyl, heterocyclyl-oxy, heterocyclyl-carbonyl, heterocyclyl-carbonyl-oxy, C₃₋₁₄cycloalkyl, aryl-C₁₋₈alkyl-amino, (aryl-C₁₋₈alkyl)₂-amino, (aryl-C₁₋₈alkyl)(C₁₋₈alkyl)amino, aryl-C₁₋₈alkyl-amino-C₁₋₈alkyl, (aryl-C₁₋₈alkyl)₂-amino-C₁₋₈alkyl, (aryl-C₁₋₈alkyl)(C₁₋₈alkyl)amino-C₁₋₈alkyl, heteroaryl, heteroaryl-C₁₋₈alkyl, heteroaryl-C₁₋₈alkoxy, heteroaryl-amino, heteroaryl-C₁₋₈alkyl-amino, (heteroaryl-C₁₋₈alkyl)₂-amino, (heteroaryl-C₁₋₈alkyl)(C₁₋₈alkyl)amino, heteroaryl-C₁₋₈alkyl-amino-C₁₋₈alkyl, (heteroaryl-C₁₋₈alkyl)₂-amino-C₁₋₈alkyl or (heteroaryl-C₁₋₈alkyl)(C₁₋₈alkyl)amino-C₁₋₈alkyl;
wherein, each instance of heterocyclyl, C₃₋₁₄cycloalkyl, aryl and heteroaryl is optionally substituted with one, two or three R₃ substituents and optionally, with one additional R₄ substituent; or,
wherein, each instance of heterocyclyl, C₃₋₁₄cycloalkyl, aryl and heteroaryl is optionally substituted with one, two, three or four R₃ substituents;
R₂ is aryl, aryl-amino, aryl-amino-carbonyl, heterocyclyl, heteroaryl or heteroaryl-amino;
wherein, each instance of aryl, heterocyclyl and heteroaryl is optionally substituted with one, two or three R₆ substituents and optionally, with one additional R₇ substituent;
Rₐ is, in each instance, independently selected from hydrogen, halogen, C₁₋₈alkyl or deuterium;
R_{b} is hydrogen, halogen, C₁₋₈alkyl, C₁₋₈alkoxy or deuterium;
R_{c} is hydrogen, halogen, C₁₋₈alkyl or deuterium;
R₃ is, in each instance, independently selected from cyano, halogen, hydroxy, oxo, C₁₋₈alkyl, halo-C₁₋₈alkyl, C₁₋₈alkyl-carbonyl, C₁₋₈alkoxy, halo-C₁₋₈alkoxy, C₁₋₈alkoxy-C₁₋₈alkyl, C₁₋₈alkoxy-carbonyl, amino, C₁₋₈alkyl-amino, (C₁₋₈alkyl)₂-amino, amino-C₁₋₈alkyl, C₁₋₈alkyl-amino-C₁₋₈alkyl, (C₁₋₈alkyl)₂-amino-C₁₋₈alkyl, amino-C₁₋₈alkyl-amino, C₁₋₈alkyl-amino-C₁₋₈alkyl-amino, (C₁₋₈alkyl-amino-C₁₋₈alkyl)₂-amino, (C₁₋₈alkyl)₂-amino-C₁₋₈alkyl-amino, [(C₁₋₈alkyl)₂-amino-C₁₋₈alkyl]₂-amino, (C₁₋₈alkyl-amino-C₁₋₈alkyl)(C₁₋₈alkyl)amino, [(C₁₋₈alkyl)₂-amino-C₁₋₈alkyl](C₁₋₈alkyl)amino, C₁₋₈alkoxy-C₁₋₈alkyl-amino, (C₁₋₈alkoxy-C₁₋₈alkyl)₂-amino, (C₁₋₈alkoxy-C₁₋₈alkyl)(C₁₋₈alkyl)amino, C₁₋₈alkyl-carbonyl-amino, C₁₋₈alkoxy-carbonyl-amino, hydroxy-C₁₋₈alkyl, hydroxy-C₁₋₈alkoxy-C₁₋₈alkyl, hydroxy-C₁₋₈alkyl-amino, (hydroxy-C₁₋₈alkyl)₂-amino or (hydroxy-C₁₋₈alkyl)(C₁₋₈alkyl)amino;
R₄ is C₃₋₁₄cycloalkyl, C₃₋₁₄cycloalkyl-C₁₋₈alkyl, C₃₋₁₄cycloalkyl-amino, aryl-C₁₋₈alkyl, aryl-C₁₋₈alkoxy-carbonyl, aryl-sulfonyloxy-C₁₋₈alkyl, heterocyclyl or heterocyclyl-C₁₋₈alkyl; wherein, each instance of C₃₋₁₄cycloalkyl, aryl and heterocyclyl is optionally substituted with one, two or three R₅ substituents;
R₅ is, in each instance, independently selected from halogen, hydroxy, cyano, nitro, C₁₋₈alkyl, halo-C₁₋₈alkyl, C₁₋₈alkoxy, halo-C₁₋₈alkoxy, amino, C₁₋₈alkyl-amino, (C₁₋₈alkyl)₂-amino or C₁₋₈alkyl-thio;
R₆ is, in each instance, independently selected from halogen, hydroxy, cyano, nitro, C₁₋₈alkyl, C₂₋₈alkenyl, halo-C₁₋₈alkyl, hydroxy-C₁₋₈alkyl, C₁₋₈alkoxy, halo-C₁₋₈alkoxy, C₁₋₈alkoxy-C₁₋₈alkyl, amino, C₁₋₈alkyl-amino, (C₁₋₈alkyl)₂-amino or C₁₋₈alkyl-thio; and, R₇ is C₃₋₁₄cycloalkyl, C₃₋₁₄cycloalkyl-oxy, aryl, heterocyclyl or heteroaryl.

3. The method of claim 2, wherein the intron further comprises a first 5′ splice site, a second branch point, and a second 3′ splice site upstream of the iREMS.

4. A method for producing a mature mRNA transcript comprising an iExon, the method comprising contacting a pre-mRNA transcript with a compound of Formula (I) or a form thereof, wherein the pre-mRNA transcript comprises two exons and an intron, wherein one exon is upstream of the intron and the other exon is downstream of the intron, wherein the intron comprises in 5′ to 3′ order: a first 5′ splice site, a first branch point, a first 3′ splice site, a non-endogenous intronic recognition element for splicing modifier (iREMS), a second branch point, and a second 3′ splice site, wherein the iREMS comprises an RNA sequence GAgurngn (SEQ ID NO: 2), wherein r is adenine or guanine and n is any nucleotide, and wherein wherein Formula (I) is: [chemical structure]
wherein:
w₁ and w₅ are independently C—Rₐ or N;
w₂ is C—R_{b} or N;
w₃, w₄ and w₇ are independently C—R₁, C—R₂, C—Rₐ or N;
w₆ is C—R₁, C—R₂, C—R_{c} or N;
wherein one of w₃, w₄, w₆ and w₇ is C—R₁ and one other of w₃, w₄, w₆ and w₇ is C—R₂, provided that,
when w₃ is C—R₁, then w₆ is C—R₂ and w₄ and w₇ are independently C—Rₐ or N; or,
when w₃ is C—R₂, then w₆ is C—R₁ and w₄ and w₇ are independently C—Rₐ or N; or,
when w₄ is C—R₁, then w₇ is C—R₂ and w₃ is C—Rₐ or N and w₆ is C—R_{c} or N; or,
when w₄ is C—R₂, then w₇ is C—R₁ and w₃ is C—Rₐ or N and w₆ is C—R_{c} or N; and,
wherein any one, two or three of w₁, w₂, w₃, w₄, w₅, w₆ and w₇ may optionally be N;
R₁ is C₁₋₈alkyl, amino, C₁₋₈alkyl-amino, (C₁₋₈alkyl)₂-amino, C₁₋₈alkoxy-C₁₋₈alkyl-amino, (C₁₋₈alkoxy-C₁₋₈alkyl)₂-amino, (C₁₋₈alkoxy-C₁₋₈alkyl)(C₁₋₈alkyl)amino, amino-C₁₋₈alkyl, C₁₋₈alkyl-amino-C₁₋₈alkyl, (C₁₋₈alkyl)₂-amino-C₁₋₈alkyl, C₁₋₈alkoxy-C₁₋₈alkyl-amino-C₁₋₈alkyl, (C₁₋₈alkoxy-C₁₋₈alkyl)₂-amino-C₁₋₈alkyl, (C₁₋₈alkoxy-C₁₋₈alkyl)(C₁₋₈alkyl)amino-C₁₋₈alkyl, amino-C₁₋₈alkyl-amino, (amino-C₁₋₈alkyl)₂-amino, (amino-C₁₋₈alkyl)(C₁₋₈alkyl)amino, C₁₋₈alkyl-amino-C₁₋₈alkyl-amino, (C₁₋₈alkyl-amino-C₁₋₈alkyl)₂-amino, (C₁₋₈alkyl-amino-C₁₋₈alkyl)(C₁₋₈alkyl)amino, (C₁₋₈alkyl)₂-amino-C₁₋₈alkyl-amino, [(C₁₋₈alkyl)₂-amino-C₁₋₈alkyl](C₁₋₈alkyl)amino, amino-C₁₋₈alkoxy, C₁₋₈alkyl-amino-C₁₋₈alkoxy, (C₁₋₈alkyl)₂-amino-C₁₋₈alkoxy, C₁₋₈alkoxy-C₁₋₈alkyl-amino-C₁₋₈alkoxy, C₁₋₈alkoxy-C₁₋₈alkyl-amino-C₁₋₈alkoxy, (C₁₋₈alkoxy-C₁₋₈alkyl)(C₁₋₈alkyl)amino-C₁₋₈alkoxy, amino-C₂₋₈alkenyl, C₁₋₈alkyl-amino-C₂₋₈alkenyl, (C₁₋₈alkyl)₂-amino-C₂₋₈alkenyl, amino-C₂₋₈alkynyl, C₁₋₈alkyl-amino-C₂₋₈alkynyl, (C₁₋₈alkyl)₂-amino-C₂₋₈alkynyl, halo-C₁₋₈alkyl-amino, (halo-C₁₋₈alkyl)₂-amino, (halo-C₁₋₈alkyl)(C₁₋₈alkyl)amino, hydroxy-C₁₋₈alkyl, hydroxy-C₁₋₈alkoxy-C₁₋₈alkyl, hydroxy-C₁₋₈alkyl-amino, (hydroxy-C₁₋₈alkyl)₂-amino, (hydroxy-C₁₋₈alkyl)(C₁₋₈alkyl)amino, hydroxy-C₁₋₈alkyl-amino-C₁₋₈alkyl, (hydroxy-C₁₋₈alkyl)₂-amino-C₁₋₈alkyl, (hydroxy-C₁₋₈alkyl)(C₁₋₈alkyl)amino-C₁₋₈alkyl, hydroxy-C₁₋₈alkyl-amino-C₁₋₈alkoxy, (hydroxy-C₁₋₈alkyl)₂-amino-C₁₋₈alkoxy, (hydroxy-C₁₋₈alkyl)(C₁₋₈alkyl)amino-C₁₋₈alkoxy, hydroxy-C₁₋₈alkyl-amino-C₁₋₈alkyl-amino, (hydroxy-C₁₋₈alkyl-amino-C₁₋₈alkyl)₂-amino, (hydroxy-C₁₋₈alkyl)₂-amino-C₁₋₈alkyl-amino, (hydroxy-C₁₋₈alkyl-amino-C₁₋₈alkyl)(C₁₋₈alkyl)amino, (hydroxy-C₁₋₈alkyl)(C₁₋₈alkyl)amino-C₁₋₈alkyl-amino, [(hydroxy-C₁₋₈alkyl)₂-amino-C₁₋₈alkyl](C₁₋₈alkyl)amino, [(hydroxy-C₁₋₈alkyl)(C₁₋₈alkyl)amino-C₁₋₈alkyl](C₁₋₈alkyl)amino, heterocyclyl, heterocyclyl-C₁₋₈alkyl, heterocyclyl-C₁₋₈alkoxy, heterocyclyl-amino, (heterocyclyl)(C₁₋₈alkyl)amino, heterocyclyl-amino-C₁₋₈alkyl, heterocyclyl-C₁₋₈alkyl-amino, (heterocyclyl-C₁₋₈alkyl)₂-amino, (heterocyclyl-C₁₋₈alkyl)(C₁₋₈alkyl)amino, heterocyclyl-C₁₋₈alkyl-amino-C₁₋₈alkyl, (heterocyclyl-C₁₋₈alkyl)₂-amino-C₁₋₈alkyl, (heterocyclyl-C₁₋₈alkyl)(C₁₋₈alkyl)amino-C₁₋₈alkyl, heterocyclyl-oxy, heterocyclyl-carbonyl, heterocyclyl-carbonyl-oxy, C₃₋₁₄cycloalkyl, aryl-C₁₋₈alkyl-amino, (aryl-C₁₋₈alkyl)₂-amino, (aryl-C₁₋₈alkyl)(C₁₋₈alkyl)amino, aryl-C₁₋₈alkyl-amino-C₁₋₈alkyl, (aryl-C₁₋₈alkyl)₂-amino-C₁₋₈alkyl, (aryl-C₁₋₈alkyl)(C₁₋₈alkyl)amino-C₁₋₈alkyl, heteroaryl, heteroaryl-C₁₋₈alkyl, heteroaryl-C₁₋₈alkoxy, heteroaryl-amino, heteroaryl-C₁₋₈alkyl-amino, (heteroaryl-C₁₋₈alkyl)₂-amino, (heteroaryl-C₁₋₈alkyl)(C₁₋₈alkyl)amino, heteroaryl-C₁₋₈alkyl-amino-C₁₋₈alkyl, (heteroaryl-C₁₋₈alkyl)₂-amino-C₁₋₈alkyl or (heteroaryl-C₁₋₈alkyl)(C₁₋₈alkyl)amino-C₁₋₈alkyl;
wherein, each instance of heterocyclyl, C₃₋₁₄cycloalkyl, aryl and heteroaryl is optionally substituted with one, two or three R₃ substituents and optionally, with one additional R₄ substituent; or,
wherein, each instance of heterocyclyl, C₃₋₁₄cycloalkyl, aryl and heteroaryl is optionally substituted with one, two, three or four R₃ substituents;
R₂ is aryl, aryl-amino, aryl-amino-carbonyl, heterocyclyl, heteroaryl or heteroaryl-amino;
wherein, each instance of aryl, heterocyclyl and heteroaryl is optionally substituted with one, two or three R₆ substituents and optionally, with one additional R₇ substituent;
Rₐ is, in each instance, independently selected from hydrogen, halogen, C₁₋₈alkyl or deuterium;
R_{b} is hydrogen, halogen, C₁₋₈alkyl, C₁₋₈alkoxy or deuterium;
R_{c} is hydrogen, halogen, C₁₋₈alkyl or deuterium;
R₃ is, in each instance, independently selected from cyano, halogen, hydroxy, oxo, C₁₋₈alkyl, halo-C₁₋₈alkyl, C₁₋₈alkyl-carbonyl, C₁₋₈alkoxy, halo-C₁₋₈alkoxy, C₁₋₈alkoxy-C₁₋₈alkyl, C₁₋₈alkoxy-carbonyl, amino, C₁₋₈alkyl-amino, (C₁₋₈alkyl)₂-amino, amino-C₁₋₈alkyl, C₁₋₈alkyl-amino-C₁₋₈alkyl, (C₁₋₈alkyl)₂-amino-C₁₋₈alkyl, amino-C₁₋₈alkyl-amino, C₁₋₈alkyl-amino-C₁₋₈alkyl-amino, (C₁₋₈alkyl-amino-C₁₋₈alkyl)₂-amino, (C₁₋₈alkyl)₂-amino-C₁₋₈alkyl-amino, [(C₁₋₈alkyl)₂-amino-C₁₋₈alkyl]₂-amino, (C₁₋₈alkyl-amino-C₁₋₈alkyl)(C₁₋₈alkyl)amino, [(C₁₋₈alkyl)₂-amino-C₁₋₈alkyl](C₁₋₈alkyl)amino, C₁₋₈alkoxy-C₁₋₈alkyl-amino, (C₁₋₈alkoxy-C₁₋₈alkyl)₂-amino, (C₁₋₈alkoxy-C₁₋₈alkyl)(C₁₋₈alkyl)amino, C₁₋₈alkyl-carbonyl-amino, C₁₋₈alkoxy-carbonyl-amino, hydroxy-C₁₋₈alkyl, hydroxy-C₁₋₈alkoxy-C₁₋₈alkyl, hydroxy-C₁₋₈alkyl-amino, (hydroxy-C₁₋₈alkyl)₂-amino or (hydroxy-C₁₋₈alkyl)(C₁₋₈alkyl)amino;
R₄ is C₃₋₁₄cycloalkyl, C₃₋₁₄cycloalkyl-C₁₋₈alkyl, C₃₋₁₄cycloalkyl-amino, aryl-C₁₋₈alkyl, aryl-C₁₋₈alkoxy-carbonyl, aryl-sulfonyloxy-C₁₋₈alkyl, heterocyclyl or heterocyclyl-C₁₋₈alkyl; wherein, each instance of C₃₋₁₄cycloalkyl, aryl and heterocyclyl is optionally substituted with one, two or three R₅ substituents;
R₅ is, in each instance, independently selected from halogen, hydroxy, cyano, nitro, C₁₋₈alkyl, halo-C₁₋₈alkyl, C₁₋₈alkoxy, halo-C₁₋₈alkoxy, amino, C₁₋₈alkyl-amino, (C₁₋₈alkyl)₂-amino or C₁₋₈alkyl-thio;
R₆ is, in each instance, independently selected from halogen, hydroxy, cyano, nitro, C₁₋₈alkyl, C₂₋₈alkenyl, halo-C₁₋₈alkyl, hydroxy-C₁₋₈alkyl, C₁₋₈alkoxy, halo-C₁₋₈alkoxy, C₁₋₈alkoxy-C₁₋₈alkyl, amino, C₁₋₈alkyl-amino, (C₁₋₈alkyl)₂-amino or C₁₋₈alkyl-thio; and,
R₇ is C₃₋₁₄cycloalkyl, C₃₋₁₄cycloalkyl-oxy, aryl, heterocyclyl or heteroaryl.

5. A method for modulating the amount of a mature mRNA transcript produced by a pre-mRNA transcript, the method comprising contacting the pre-mRNA transcript with the a compound of Formula (I) or a form thereof, wherein the pre-mRNA transcript comprises two exons and an intron, wherein one exon is upstream of the intron and the other exon is downstream of the intron, wherein the intron comprises a RNA nucleotide sequence comprising in 5′ to 3′ order: a non-endogenous intronic recognition element for splicing modifier (iREMS), a first branch point, and a first 3′ splice site, wherein the iREMS comprises an RNA sequence GAgurngn (SEQ ID NO: 2), wherein r is adenine or guanine and n is any nucleotide, and wherein wherein Formula (I) is: [chemical structure]
wherein:
w₁ and w₅ are independently C—Rₐ or N;
w₂ is C—R_{b} or N;
w₃, w₄ and w₇ are independently C—R₁, C—R₂, C—Rₐ or N;
w₆ is C—R₁, C—R₂, C—R_{c} or N;
wherein one of w₃, w₄, w₆ and w₇ is C—R₁ and one other of w₃, w₄, w₆ and w₇ is C—R₂, provided that,
when w₃ is C—R₁, then w₆ is C—R₂ and w₄ and w₇ are independently C—Rₐ or N; or,
when w₃ is C—R₂, then w₆ is C—R₁ and w₄ and w₇ are independently C—Rₐ or N; or,
when w₄ is C—R₁, then w₇ is C—R₂ and w₃ is C—Rₐ or N and w₆ is C—R_{c} or N; or,
when w₄ is C—R₂, then w₇ is C—R₁ and w₃ is C—Rₐ or N and w₆ is C—R_{c} or N; and,
wherein any one, two or three of w₁, w₂, w₃, w₄, w₅, w₆ and w₇ may optionally be N;
R₁ is C₁₋₈alkyl, amino, C₁₋₈alkyl-amino, (C₁₋₈alkyl)₂-amino, C₁₋₈alkoxy-C₁₋₈alkyl-amino, (C₁₋₈alkoxy-C₁₋₈alkyl)₂-amino, (C₁₋₈alkoxy-C₁₋₈alkyl)(C₁₋₈alkyl)amino, amino-C₁₋₈alkyl, C₁₋₈alkyl-amino-C₁₋₈alkyl, (C₁₋₈alkyl)₂-amino-C₁₋₈alkyl, C₁₋₈alkoxy-C₁₋₈alkyl-amino-C₁₋₈alkyl, (C₁₋₈alkoxy-C₁₋₈alkyl)₂-amino-C₁₋₈alkyl, (C₁₋₈alkoxy-C₁₋₈alkyl)(C₁₋₈alkyl)amino-C₁₋₈alkyl, amino-C₁₋₈alkyl-amino, (amino-C₁₋₈alkyl)₂-amino, (amino-C₁₋₈alkyl)(C₁₋₈alkyl)amino, C₁₋₈alkyl-amino-C₁₋₈alkyl-amino, (C₁₋₈alkyl-amino-C₁₋₈alkyl)₂-amino, (C₁₋₈alkyl-amino-C₁₋₈alkyl)(C₁₋₈alkyl)amino, (C₁₋₈alkyl)₂-amino-C₁₋₈alkyl-amino, [(C₁₋₈alkyl)₂-amino-C₁₋₈alkyl](C₁₋₈alkyl)amino, amino-C₁₋₈alkoxy, C₁₋₈alkyl-amino-C₁₋₈alkoxy, (C₁₋₈alkyl)₂-amino-C₁₋₈alkoxy, C₁₋₈alkoxy-C₁₋₈alkyl-amino-C₁₋₈alkoxy, C₁₋₈alkoxy-C₁₋₈alkyl-amino-C₁₋₈alkoxy, (C₁₋₈alkoxy-C₁₋₈alkyl)(C₁₋₈alkyl)amino-C₁₋₈alkoxy, amino-C₂₋₈alkenyl, C₁₋₈alkyl-amino-C₂₋₈alkenyl, (C₁₋₈alkyl)₂-amino-C₂₋₈alkenyl, amino-C₂₋₈alkynyl, C₁₋₈alkyl-amino-C₂₋₈alkynyl, (C₁₋₈alkyl)₂-amino-C₂₋₈alkynyl, halo-C₁₋₈alkyl-amino, (halo-C₁₋₈alkyl)₂-amino, (halo-C₁₋₈alkyl)(C₁₋₈alkyl)amino, hydroxy-C₁₋₈alkyl, hydroxy-C₁₋₈alkoxy-C₁₋₈alkyl, hydroxy-C₁₋₈alkyl-amino, (hydroxy-C₁₋₈alkyl)₂-amino, (hydroxy-C₁₋₈alkyl)(C₁₋₈alkyl)amino, hydroxy-C₁₋₈alkyl-amino-C₁₋₈alkyl, (hydroxy-C₁₋₈alkyl)₂-amino-C₁₋₈alkyl, (hydroxy-C₁₋₈alkyl)(C₁₋₈alkyl)amino-C₁₋₈alkyl, hydroxy-C₁₋₈alkyl-amino-C₁₋₈alkoxy, (hydroxy-C₁₋₈alkyl)₂-amino-C₁₋₈alkoxy, (hydroxy-C₁₋₈alkyl)(C₁₋₈alkyl)amino-C₁₋₈alkoxy, hydroxy-C₁₋₈alkyl-amino-C₁₋₈alkyl-amino, (hydroxy-C₁₋₈alkyl-amino-C₁₋₈alkyl)₂-amino, (hydroxy-C₁₋₈alkyl)₂-amino-C₁₋₈alkyl-amino, (hydroxy-C₁₋₈alkyl-amino-C₁₋₈alkyl)(C₁₋₈alkyl)amino, (hydroxy-C₁₋₈alkyl)(C₁₋₈alkyl)amino-C₁₋₈alkyl-amino, [(hydroxy-C₁₋₈alkyl)₂-amino-C₁₋₈alkyl](C₁₋₈alkyl)amino, [(hydroxy-C₁₋₈alkyl)(C₁₋₈alkyl)amino-C₁₋₈alkyl](C₁₋₈alkyl)amino, heterocyclyl, heterocyclyl-C₁₋₈alkyl, heterocyclyl-C₁₋₈alkoxy, heterocyclyl-amino, (heterocyclyl)(C₁₋₈alkyl)amino, heterocyclyl-amino-C₁₋₈alkyl, heterocyclyl-C₁₋₈alkyl-amino, (heterocyclyl-C₁₋₈alkyl)₂-amino, (heterocyclyl-C₁₋₈alkyl)(C₁₋₈alkyl)amino, heterocyclyl-C₁₋₈alkyl-amino-C₁₋₈alkyl, (heterocyclyl-C₁₋₈alkyl)₂-amino-C₁₋₈alkyl, (heterocyclyl-C₁₋₈alkyl)(C₁₋₈alkyl)amino-C₁₋₈alkyl, heterocyclyl-oxy, heterocyclyl-carbonyl, heterocyclyl-carbonyl-oxy, C₃₋₁₄cycloalkyl, aryl-C₁₋₈alkyl-amino, (aryl-C₁₋₈alkyl)₂-amino, (aryl-C₁₋₈alkyl)(C₁₋₈alkyl)amino, aryl-C₁₋₈alkyl-amino-C₁₋₈alkyl, (aryl-C₁₋₈alkyl)₂-amino-C₁₋₈alkyl, (aryl-C₁₋₈alkyl)(C₁₋₈alkyl)amino-C₁₋₈alkyl, heteroaryl, heteroaryl-C₁₋₈alkyl, heteroaryl-C₁₋₈alkoxy, heteroaryl-amino, heteroaryl-C₁₋₈alkyl-amino, (heteroaryl-C₁₋₈alkyl)₂-amino, (heteroaryl-C₁₋₈alkyl)(C₁₋₈alkyl)amino, heteroaryl-C₁₋₈alkyl-amino-C₁₋₈alkyl, (heteroaryl-C₁₋₈alkyl)₂-amino-C₁₋₈alkyl or (heteroaryl-C₁₋₈alkyl)(C₁₋₈alkyl)amino-C₁₋₈alkyl;
wherein, each instance of heterocyclyl, C₃₋₁₄cycloalkyl, aryl and heteroaryl is optionally substituted with one, two or three R₃ substituents and optionally, with one additional R₄ substituent; or,
wherein, each instance of heterocyclyl, C₃₋₁₄cycloalkyl, aryl and heteroaryl is optionally substituted with one, two, three or four R₃ substituents;
R₂ is aryl, aryl-amino, aryl-amino-carbonyl, heterocyclyl, heteroaryl or heteroaryl-amino;
wherein, each instance of aryl, heterocyclyl and heteroaryl is optionally substituted with one, two or three R₆ substituents and optionally, with one additional R₇ substituent;
Rₐ is, in each instance, independently selected from hydrogen, halogen, C₁₋₈alkyl or deuterium;
R_{b} is hydrogen, halogen, C₁₋₈alkyl, C₁₋₈alkoxy or deuterium;
R_{c} is hydrogen, halogen, C₁₋₈alkyl or deuterium;
R₃ is, in each instance, independently selected from cyano, halogen, hydroxy, oxo, C₁₋₈alkyl, halo-C₁₋₈alkyl, C₁₋₈alkyl-carbonyl, C₁₋₈alkoxy, halo-C₁₋₈alkoxy, C₁₋₈alkoxy-C₁₋₈alkyl, C₁₋₈alkoxy-carbonyl, amino, C₁₋₈alkyl-amino, (C₁₋₈alkyl)₂-amino, amino-C₁₋₈alkyl, C₁₋₈alkyl-amino-C₁₋₈alkyl, (C₁₋₈alkyl)₂-amino-C₁₋₈alkyl, amino-C₁₋₈alkyl-amino, C₁₋₈alkyl-amino-C₁₋₈alkyl-amino, (C₁₋₈alkyl-amino-C₁₋₈alkyl)₂-amino, (C₁₋₈alkyl)₂-amino-C₁₋₈alkyl-amino, [(C₁₋₈alkyl)₂-amino-C₁₋₈alkyl]₂-amino, (C₁₋₈alkyl-amino-C₁₋₈alkyl)(C₁₋₈alkyl)amino, [(C₁₋₈alkyl)₂-amino-C₁₋₈alkyl](C₁₋₈alkyl)amino, C₁₋₈alkoxy-C₁₋₈alkyl-amino, (C₁₋₈alkoxy-C₁₋₈alkyl)₂-amino, (C₁₋₈alkoxy-C₁₋₈alkyl)(C₁₋₈alkyl)amino, C₁₋₈alkyl-carbonyl-amino, C₁₋₈alkoxy-carbonyl-amino, hydroxy-C₁₋₈alkyl, hydroxy-C₁₋₈alkoxy-C₁₋₈alkyl, hydroxy-C₁₋₈alkyl-amino, (hydroxy-C₁₋₈alkyl)₂-amino or (hydroxy-C₁₋₈alkyl)(C₁₋₈alkyl)amino;
R₄ is C₃₋₁₄cycloalkyl, C₃₋₁₄cycloalkyl-C₁₋₈alkyl, C₃₋₁₄cycloalkyl-amino, aryl-C₁₋₈alkyl, aryl-C₁₋₈alkoxy-carbonyl, aryl-sulfonyloxy-C₁₋₈alkyl, heterocyclyl or heterocyclyl-C₁₋₈alkyl; wherein, each instance of C₃₋₁₄cycloalkyl, aryl and heterocyclyl is optionally substituted with one, two or three R₅ substituents;
R₅ is, in each instance, independently selected from halogen, hydroxy, cyano, nitro, C₁₋₈alkyl, halo-C₁₋₈alkyl, C₁₋₈alkoxy, halo-C₁₋₈alkoxy, amino, C₁₋₈alkyl-amino, (C₁₋₈alkyl)₂-amino or C₁₋₈alkyl-thio;
R₆ is, in each instance, independently selected from halogen, hydroxy, cyano, nitro, C₁₋₈alkyl, C₂₋₈alkenyl, halo-C₁₋₈alkyl, hydroxy-C₁₋₈alkyl, C₁₋₈alkoxy, halo-C₁₋₈alkoxy, C₁₋₈alkoxy-C₁₋₈alkyl, amino, C₁₋₈alkyl-amino, (C₁₋₈alkyl)₂-amino or C₁₋₈alkyl-thio; and,
R₇ is C₃₋₁₄cycloalkyl, C₃₋₁₄cycloalkyl-oxy, aryl, heterocyclyl or heteroaryl.

6. The method of any one of claims 1-5, wherein the iREMS comprises an RNA sequence GAguragu, and wherein r is adenine or guanine.

7. The method of any one of claims 1-5, wherein the iREMS comprises an RNA sequence NNGAgurngn (SEQ ID NO: 1), and wherein r is adenine or guanine and n or N is any nucleotide.

8. The method of claim 7, wherein the RNA sequence NNGAgurngn (SEQ ID NO: 1) is selected from the group consisting of ANGAgurngn (SEQ ID NO: 29), CNGAgurngn (SEQ ID NO: 35), GNGAgurngn (SEQ ID NO: 41), UNGAgurngn (SEQ ID NO: 47), NAGAgurngn (SEQ ID NO: 30), NCGAgurngn (SEQ ID NO: 36), NGGAgurngn (SEQ ID NO: 42), NUGAgumgn (SEQ ID NO: 48), AAGAgurngn (SEQ ID NO: 31), ACGAgurngn (SEQ ID NO: 37), AGGAgurngn (SEQ ID NO: 43), AUGAgumgn (SEQ ID NO: 49), CAGAgurngn (SEQ ID NO: 32), CCGAgurngn (SEQ ID NO: 38), CGGAgurngn (SEQ ID NO: 44), CUGAgurngn (SEQ ID NO: 50), GAGAgurngn (SEQ ID NO: 33), GCGAgumgn (SEQ ID NO: 39), GGGAgurngn (SEQ ID NO: 45), GUGAgumgn (SEQ ID NO: 51), UAGAgurngn (SEQ ID NO: 34), UCGAgumgn (SEQ ID NO: 40), UGGAgurngn (SEQ ID NO: 46) and UUGAgumgn (SEQ ID NO: 52), wherein r is adenine or guanine and n or N is any nucleotide.

9. The method of any one of claims 1-5, wherein the iREMS comprises an RNA sequence NNGAguragu (SEQ ID NO: 3862), wherein r is adenine or guanine and N is any nucleotide.

10. The method of claim 9, wherein the RNA sequence NNGAguragu (SEQ ID NO: 3862) is selected from the group consisting of ANGAguragu (SEQ ID NO: 437), CNGAguragu (SEQ ID NO: 443), GNGAguragu (SEQ ID NO: 449), UNGAguragu (SEQ ID NO: 455), NAGAguragu (SEQ ID NO: 438), NCGAguragu (SEQ ID NO: 444), NGGAguragu (SEQ ID NO: 450), NUGAguragu (SEQ ID NO: 456), AAGAguragu (SEQ ID NO: 439), ACGAguragu (SEQ ID NO: 445), AGGAguragu (SEQ ID NO: 451), AUGAguragu (SEQ ID NO: 457), CAGAguragu (SEQ ID NO: 440), CCGAguragu (SEQ ID NO: 446), CGGAguragu (SEQ ID NO: 452), CUGAguragu (SEQ ID NO: 458), GAGAguragu (SEQ ID NO: 441), GCGAguragu (SEQ ID NO: 447), GGGAguragu (SEQ ID NO: 453), GUGAguragu (SEQ ID NO: 459), UAGAguragu (SEQ ID NO: 442), UCGAguragu (SEQ ID NO: 448), UGGAguragu (SEQ ID NO: 454) and UUGAguragu (SEQ ID NO: 460), wherein r is adenine or guanine, and N is any nucleotide.

11. An artificial gene construct comprising an RNA sequence comprising exons and one or more introns, wherein at least one intron comprises an iREMS that is downstream of a branch point and a 3′ splice site, and wherein the iREMS comprises the sequence GAgurngn (SEQ ID NO: 2), wherein r is adenine or guanine and n is any nucleotide.

12. An artificial gene construct comprising an RNA sequence comprising two exons and an intron, wherein one exon is upstream of the intron and the other exon is downstream of the intron, wherein the RNA nucleotide sequence of the intron comprises in 5′ to 3′ order: a first 5′ splice site, a first branch point, a first 3′ splice site, an iREMS, a second branch point and a second 3′ splice site, wherein the iREMS comprises an RNA sequence GAgurngn (SEQ ID NO: 2), wherein r is adenine or guanine and n is any nucleotide.

13. An artificial gene construct comprising an RNA sequence comprising two exons and an intron, wherein one exon is upstream of the intron and the other exon is downstream of the intron, wherein the RNA nucleotide sequence of the intron comprises in 5′ to 3′ order: an iREMS, a first branch point and a first 3′ splice site, wherein the iREMS comprises an RNA sequence GAgurngn (SEQ ID NO: 2), wherein r is adenine or guanine and n is any nucleotide.

14. The method of any one of claims 1-10, wherein the pre-mRNA transcript is in a cell or a lysate of the cell and the method comprises contacting the cell or cell lysate with the compound.

15. The method of claim 14, wherein the modulation of the production of the mature mRNA transcript modulates the amount and/or type of a protein translated from the mature mRNA transcript and produced in the cell or lysate of the cell.

16. The method of any one of claims 1-10, 14 and 15, wherein the pre-mRNA transcript encodes a detectable reporter protein.

The application's sequence listing, which the Patent Office published only in electronic form, follows.

SEQUENCE LISTING (3866 sequences)

SEQ ID NO: 1-150 - skipped (150 entries)

SEQ ID NO: 151 - RNA, 10 nt, synthetic construct
  misc_feature 1..10: note = intronic recognition element for splicing modifier (REMS)
  source 1..10: mol_type = other RNA
aagagtraga

SEQ ID NO: 152 - RNA, 10 nt, synthetic construct
  misc_feature 1..10: note = intronic recognition element for splicing modifier (REMS)
  source 1..10: mol_type = other RNA
cagagtraga

SEQ ID NO: 153 - RNA, 10 nt, synthetic construct
  misc_feature 1..10: note = intronic recognition element for splicing modifier (REMS)
  source 1..10: mol_type = other RNA
gagagtraga

SEQ ID NO: 154 - RNA, 10 nt, synthetic construct
  misc_feature 1..10: note = intronic recognition element for splicing modifier (REMS)
  source 1..10: mol_type = other RNA
tagagtraga

SEQ ID NO: 155-156 - skipped (2 entries)

SEQ ID NO: 157 - RNA, 10 nt, synthetic construct
  misc_feature 1..10: note = intronic recognition element for splicing modifier (REMS)
  source 1..10: mol_type = other RNA
acgagtraga

SEQ ID NO: 158 - RNA, 10 nt, synthetic construct
  misc_feature 1..10: note = intronic recognition element for splicing modifier (REMS)
  source 1..10: mol_type = other RNA
ccgagtraga

SEQ ID NO: 159 - RNA, 10 nt, synthetic construct
  misc_feature 1..10: note = intronic recognition element for splicing modifier (REMS)
  source 1..10: mol_type = other RNA
gcgagtraga

SEQ ID NO: 160 - RNA, 10 nt, synthetic construct
  misc_feature 1..10: note = intronic recognition element for splicing modifier (REMS)
  source 1..10: mol_type = other RNA
tcgagtraga

SEQ ID NO: 161-162 - skipped (2 entries)

SEQ ID NO: 163 - RNA, 10 nt, synthetic construct
  misc_feature 1..10: note = intronic recognition element for splicing modifier (REMS)
  source 1..10: mol_type = other RNA
aggagtraga

SEQ ID NO: 164 - RNA, 10 nt, synthetic construct
  misc_feature 1..10: note = intronic recognition element for splicing modifier (REMS)
  source 1..10: mol_type = other RNA
cggagtraga

SEQ ID NO: 165 - RNA, 10 nt, synthetic construct
  misc_feature 1..10: note = intronic recognition element for splicing modifier (REMS)
  source 1..10: mol_type = other RNA
gggagtraga

SEQ ID NO: 166 - RNA, 10 nt, synthetic construct
  misc_feature 1..10: note = intronic recognition element for splicing modifier (REMS)
  source 1..10: mol_type = other RNA
tggagtraga

SEQ ID NO: 167-168 - skipped (2 entries)

SEQ ID NO: 169 - RNA, 10 nt, synthetic construct
  misc_feature 1..10: note = intronic recognition element for splicing modifier (REMS)
  source 1..10: mol_type = other RNA
atgagtraga

SEQ ID NO: 170 - RNA, 10 nt, synthetic construct
  misc_feature 1..10: note = intronic recognition element for splicing modifier (REMS)
  source 1..10: mol_type = other RNA
ctgagtraga

SEQ ID NO: 171 - RNA, 10 nt, synthetic construct
  misc_feature 1..10: note = intronic recognition element for splicing modifier (REMS)
  source 1..10: mol_type = other RNA
gtgagtraga

SEQ ID NO: 172 - RNA, 10 nt, synthetic construct
  misc_feature 1..10: note = intronic recognition element for splicing modifier (REMS)
  source 1..10: mol_type = other RNA
ttgagtraga

SEQ ID NO: 173-174 - skipped (2 entries)

SEQ ID NO: 175 - RNA, 10 nt, synthetic construct
  misc_feature 1..10: note = intronic recognition element for splicing modifier (REMS)
  source 1..10: mol_type = other RNA
aagagtrcga

SEQ ID NO: 176 - RNA, 10 nt, synthetic construct
  misc_feature 1..10: note = intronic recognition element for splicing modifier (REMS)
  source 1..10: mol_type = other RNA
cagagtrcga

SEQ ID NO: 177 - RNA, 10 nt, synthetic construct
  misc_feature 1..10: note = intronic recognition element for splicing modifier (REMS)
  source 1..10: mol_type = other RNA
gagagtrcga

SEQ ID NO: 178 - RNA, 10 nt, synthetic construct
  misc_feature 1..10: note = intronic recognition element for splicing modifier (REMS)
  source 1..10: mol_type = other RNA
tagagtrcga

SEQ ID NO: 179-180 - skipped (2 entries)

SEQ ID NO: 181 - RNA, 10 nt, synthetic construct
  misc_feature 1..10: note = intronic recognition element for splicing modifier (REMS)
  source 1..10: mol_type = other RNA
acgagtrcga

SEQ ID NO: 182 - RNA, 10 nt, synthetic construct
  misc_feature 1..10: note = intronic recognition element for splicing modifier (REMS)
  source 1..10: mol_type = other RNA
ccgagtrcga

SEQ ID NO: 183 - RNA, 10 nt, synthetic construct
  misc_feature 1..10: note = intronic recognition element for splicing modifier (REMS)
  source 1..10: mol_type = other RNA
gcgagtrcga

SEQ ID NO: 184 - RNA, 10 nt, synthetic construct
  misc_feature 1..10: note = intronic recognition element for splicing modifier (REMS)
  source 1..10: mol_type = other RNA
tcgagtrcga

SEQ ID NO: 185-186 - skipped (2 entries)

SEQ ID NO: 187 - RNA, 10 nt, synthetic construct
  misc_feature 1..10: note = intronic recognition element for splicing modifier (REMS)
  source 1..10: mol_type = other RNA
aggagtrcga

SEQ ID NO: 188 - RNA, 10 nt, synthetic construct
  misc_feature 1..10: note = intronic recognition element for splicing modifier (REMS)
  source 1..10: mol_type = other RNA
cggagtrcga

SEQ ID NO: 189 - RNA, 10 nt, synthetic construct
  misc_feature 1..10: note = intronic recognition element for splicing modifier (REMS)
  source 1..10: mol_type = other RNA
gggagtrcga

SEQ ID NO: 190 - RNA, 10 nt, synthetic construct
  misc_feature 1..10: note = intronic recognition element for splicing modifier (REMS)
  source 1..10: mol_type = other RNA
tggagtrcga

SEQ ID NO: 191-192 - skipped (2 entries)

SEQ ID NO: 193 - RNA, 10 nt, synthetic construct
  misc_feature 1..10: note = intronic recognition element for splicing modifier (REMS)
  source 1..10: mol_type = other RNA
atgagtrcga

SEQ ID NO: 194 - RNA, 10 nt, synthetic construct
  misc_feature 1..10: note = intronic recognition element for splicing modifier (REMS)
  source 1..10: mol_type = other RNA
ctgagtrcga

SEQ ID NO: 195 - RNA, 10 nt, synthetic construct
  misc_feature 1..10: note = intronic recognition element for splicing modifier (REMS)
  source 1..10: mol_type = other RNA
gtgagtrcga

SEQ ID NO: 196 - RNA, 10 nt, synthetic construct
  misc_feature 1..10: note = intronic recognition element for splicing modifier (REMS)
  source 1..10: mol_type = other RNA
ttgagtrcga

SEQ ID NO: 197-198 - skipped (2 entries)

SEQ ID NO: 199 - RNA, 10 nt, synthetic construct
  misc_feature 1..10: note = intronic recognition element for splicing modifier (REMS)
  source 1..10: mol_type = other RNA
aagagtrgga

SEQ ID NO: 200 - RNA, 10 nt, synthetic construct
  misc_feature 1..10: note = intronic recognition element for splicing modifier (REMS)
  source 1..10: mol_type = other RNA
cagagtrgga

SEQ ID NO: 201 - RNA, 10 nt, synthetic construct
  misc_feature 1..10: note = intronic recognition element for splicing modifier (REMS)
  source 1..10: mol_type = other RNA
gagagtrgga

SEQ ID NO: 202 - RNA, 10 nt, synthetic construct
  misc_feature 1..10: note = intronic recognition element for splicing modifier (REMS)
  source 1..10: mol_type = other RNA
tagagtrgga

SEQ ID NO: 203-204 - skipped (2 entries)

SEQ ID NO: 205 - RNA, 10 nt, synthetic construct
  misc_feature 1..10: note = intronic recognition element for splicing modifier (REMS)
  source 1..10: mol_type = other RNA
acgagtrgga

SEQ ID NO: 206 - RNA, 10 nt, synthetic construct
  misc_feature 1..10: note = intronic recognition element for splicing modifier (REMS)
  source 1..10: mol_type = other RNA
ccgagtrgga

SEQ ID NO: 207 - RNA, 10 nt, synthetic construct
  misc_feature 1..10: note = intronic recognition element for splicing modifier (REMS)
  source 1..10: mol_type = other RNA
gcgagtrgga

SEQ ID NO: 208 - RNA, 10 nt, synthetic construct
  misc_feature 1..10: note = intronic recognition element for splicing modifier (REMS)
  source 1..10: mol_type = other RNA
tcgagtrgga

SEQ ID NO: 209-210 - skipped (2 entries)

SEQ ID NO: 211 - RNA, 10 nt, synthetic construct
  misc_feature 1..10: note = intronic recognition element for splicing modifier (REMS)
  source 1..10: mol_type = other RNA
aggagtrgga

SEQ ID NO: 212 - RNA, 10 nt, synthetic construct
  misc_feature 1..10: note = intronic recognition element for splicing modifier (REMS)
  source 1..10: mol_type = other RNA
cggagtrgga

SEQ ID NO: 213 - RNA, 10 nt, synthetic construct
  misc_feature 1..10: note = intronic recognition element for splicing modifier (REMS)
  source 1..10: mol_type = other RNA
gggagtrgga

SEQ ID NO: 214 - RNA, 10 nt, synthetic construct
  misc_feature 1..10: note = intronic recognition element for splicing modifier (REMS)
  source 1..10: mol_type = other RNA
tggagtrgga

SEQ ID NO: 215-216 - skipped (2 entries)

SEQ ID NO: 217 - RNA, 10 nt, synthetic construct
  misc_feature 1..10: note = intronic recognition element for splicing modifier (REMS)
  source 1..10: mol_type = other RNA
atgagtrgga

SEQ ID NO: 218 - RNA, 10 nt, synthetic construct
  misc_feature 1..10: note = intronic recognition element for splicing modifier (REMS)
  source 1..10: mol_type = other RNA
ctgagtrgga

SEQ ID NO: 219 - RNA, 10 nt, synthetic construct
  misc_feature 1..10: note = intronic recognition element for splicing modifier (REMS)
  source 1..10: mol_type = other RNA
gtgagtrgga

SEQ ID NO: 220 - RNA, 10 nt, synthetic construct
  misc_feature 1..10: note = intronic recognition element for splicing modifier (REMS)
  source 1..10: mol_type = other RNA
ttgagtrgga

SEQ ID NO: 221-222 - skipped (2 entries)

SEQ ID NO: 223 - RNA, 10 nt, synthetic construct
  misc_feature 1..10: note = intronic recognition element for splicing modifier (REMS)
  source 1..10: mol_type = other RNA
aagagtrtga

SEQ ID NO: 224 - RNA, 10 nt, synthetic construct
  misc_feature 1..10: note = intronic recognition element for splicing modifier (REMS)
  source 1..10: mol_type = other RNA
cagagtrtga

SEQ ID NO: 225 - RNA, 10 nt, synthetic construct
  misc_feature 1..10: note = intronic recognition element for splicing modifier (REMS)
  source 1..10: mol_type = other RNA
gagagtrtga

SEQ ID NO: 226 - RNA, 10 nt, synthetic construct
  misc_feature 1..10: note = intronic recognition element for splicing modifier (REMS)
  source 1..10: mol_type = other RNA
tagagtrtga

SEQ ID NO: 227-228 - skipped (2 entries)

SEQ ID NO: 229 - RNA, 10 nt, synthetic construct
  misc_feature 1..10: note = intronic recognition element for splicing modifier (REMS)
  source 1..10: mol_type = other RNA
acgagtrtga

SEQ ID NO: 230 - RNA, 10 nt, synthetic construct
  misc_feature 1..10: note = intronic recognition element for splicing modifier (REMS)
  source 1..10: mol_type = other RNA
ccgagtrtga

SEQ ID NO: 231 - RNA, 10 nt, synthetic construct
  misc_feature 1..10: note = intronic recognition element for splicing modifier (REMS)
  source 1..10: mol_type = other RNA
gcgagtrtga

SEQ ID NO: 232 - RNA, 10 nt, synthetic construct
  misc_feature 1..10: note = intronic recognition element for splicing modifier (REMS)
  source 1..10: mol_type = other RNA
tcgagtrtga

SEQ ID NO: 233-234 - skipped (2 entries)

SEQ ID NO: 235 - RNA, 10 nt, synthetic construct
  misc_feature 1..10: note = intronic recognition element for splicing modifier (REMS)
  source 1..10: mol_type = other RNA
aggagtrtga

SEQ ID NO: 236 - RNA, 10 nt, synthetic construct
  misc_feature 1..10: note = intronic recognition element for splicing modifier (REMS)
  source 1..10: mol_type = other RNA
cggagtrtga

SEQ ID NO: 237 - RNA, 10 nt, synthetic construct
  misc_feature 1..10: note = intronic recognition element for splicing modifier (REMS)
  source 1..10: mol_type = other RNA
gggagtrtga

SEQ ID NO: 238 - RNA, 10 nt, synthetic construct
  misc_feature 1..10: note = intronic recognition element for splicing modifier (REMS)
  source 1..10: mol_type = other RNA
tggagtrtga

SEQ ID NO: 239-240 - skipped (2 entries)

SEQ ID NO: 241 - RNA, 10 nt, synthetic construct
  misc_feature 1..10: note = intronic recognition element for splicing modifier (REMS)
  source 1..10: mol_type = other RNA
atgagtrtga

SEQ ID NO: 242 - RNA, 10 nt, synthetic construct
  misc_feature 1..10: note = intronic recognition element for splicing modifier (REMS)
  source 1..10: mol_type = other RNA
ctgagtrtga

SEQ ID NO: 243 - RNA, 10 nt, synthetic construct
  misc_feature 1..10: note = intronic recognition element for splicing modifier (REMS)
  source 1..10: mol_type = other RNA
gtgagtrtga

SEQ ID NO: 244 - RNA, 10 nt, synthetic construct
  misc_feature 1..10: note = intronic recognition element for splicing modifier (REMS)
  source 1..10: mol_type = other RNA
ttgagtrtga

SEQ ID NO: 245-246 - skipped (2 entries)

SEQ ID NO: 247 - RNA, 10 nt, synthetic construct
  misc_feature 1..10: note = intronic recognition element for splicing modifier (REMS)
  source 1..10: mol_type = other RNA
aagagtragc

SEQ ID NO: 248 - RNA, 10 nt, synthetic construct
  misc_feature 1..10: note = intronic recognition element for splicing modifier (REMS)
  source 1..10: mol_type = other RNA
cagagtragc

SEQ ID NO: 249 - RNA, 10 nt, synthetic construct
  misc_feature 1..10: note = intronic recognition element for splicing modifier (REMS)
  source 1..10: mol_type = other RNA
gagagtragc

SEQ ID NO: 250 - RNA, 10 nt, synthetic construct
  misc_feature 1..10: note = intronic recognition element for splicing modifier (REMS)
  source 1..10: mol_type = other RNA
tagagtragc

SEQ ID NO: 251-252 - skipped (2 entries)

SEQ ID NO: 253 - RNA, 10 nt, synthetic construct
  misc_feature 1..10: note = intronic recognition element for splicing modifier (REMS)
  source 1..10: mol_type = other RNA
acgagtragc

SEQ ID NO: 254 - RNA, 10 nt, synthetic construct
  misc_feature 1..10: note = intronic recognition element for splicing modifier (REMS)
  source 1..10: mol_type = other RNA
ccgagtragc

SEQ ID NO: 255 - RNA, 10 nt, synthetic construct
  misc_feature 1..10: note = intronic recognition element for splicing modifier (REMS)
  source 1..10: mol_type = other RNA
gcgagtragc

SEQ ID NO: 256 - RNA, 10 nt, synthetic construct
  misc_feature 1..10: note = intronic recognition element for splicing modifier (REMS)
  source 1..10: mol_type = other RNA
tcgagtragc

SEQ ID NO: 257-258 - skipped (2 entries)

SEQ ID NO: 259 - RNA, 10 nt, synthetic construct
  misc_feature 1..10: note = intronic recognition element for splicing modifier (REMS)
  source 1..10: mol_type = other RNA
aggagtragc

SEQ ID NO: 260 - RNA, 10 nt, synthetic construct
  misc_feature 1..10: note = intronic recognition element for splicing modifier (REMS)
  source 1..10: mol_type = other RNA
cggagtragc

SEQ ID NO: 261 - RNA, 10 nt, synthetic construct
  misc_feature 1..10: note = intronic recognition element for splicing modifier (REMS)
  source 1..10: mol_type = other RNA
gggagtragc

SEQ ID NO: 262 - RNA, 10 nt, synthetic construct
  misc_feature 1..10: note = intronic recognition element for splicing modifier (REMS)
  source 1..10: mol_type = other RNA
tggagtragc

SEQ ID NO: 263-264 - skipped (2 entries)

SEQ ID NO: 265 - RNA, 10 nt, synthetic construct
  misc_feature 1..10: note = intronic recognition element for splicing modifier (REMS)
  source 1..10: mol_type = other RNA
atgagtragc

SEQ ID NO: 266 - RNA, 10 nt, synthetic construct
  misc_feature 1..10: note = intronic recognition element for splicing modifier (REMS)
  source 1..10: mol_type = other RNA
ctgagtragc

SEQ ID NO: 267 - RNA, 10 nt, synthetic construct
  misc_feature 1..10: note = intronic recognition element for splicing modifier (REMS)
  source 1..10: mol_type = other RNA
gtgagtragc

SEQ ID NO: 268 - RNA, 10 nt, synthetic construct
  misc_feature 1..10: note = intronic recognition element for splicing modifier (REMS)
  source 1..10: mol_type = other RNA
ttgagtragc

SEQ ID NO: 269-270 - skipped (2 entries)

SEQ ID NO: 271 - RNA, 10 nt, synthetic construct
  misc_feature 1..10: note = intronic recognition element for splicing modifier (REMS)
  source 1..10: mol_type = other RNA
aagagtrcgc

SEQ ID NO: 272 - RNA, 10 nt, synthetic construct
  misc_feature 1..10: note = intronic recognition element for splicing modifier (REMS)
  source 1..10: mol_type = other RNA
cagagtrcgc

SEQ ID NO: 273 - RNA, 10 nt, synthetic construct
  misc_feature 1..10: note = intronic recognition element for splicing modifier (REMS)
  source 1..10: mol_type = other RNA
gagagtrcgc

SEQ ID NO: 274 - RNA, 10 nt, synthetic construct
  misc_feature 1..10: note = intronic recognition element for splicing modifier (REMS)
  source 1..10: mol_type = other RNA
tagagtrcgc

SEQ ID NO: 275-276 - skipped (2 entries)

SEQ ID NO: 277 - RNA, 10 nt, synthetic construct
  misc_feature 1..10: note = intronic recognition element for splicing modifier (REMS)
  source 1..10: mol_type = other RNA
acgagtrcgc

SEQ ID NO: 278 - RNA, 10 nt, synthetic construct
  misc_feature 1..10: note = intronic recognition element for splicing modifier (REMS)
  source 1..10: mol_type = other RNA
ccgagtrcgc

SEQ ID NO: 279 - RNA, 10 nt, synthetic construct
  misc_feature 1..10: note = intronic recognition element for splicing modifier (REMS)
  source 1..10: mol_type = other RNA
gcgagtrcgc

SEQ ID NO: 280 - RNA, 10 nt, synthetic construct
  misc_feature 1..10: note = intronic recognition element for splicing modifier (REMS)
  source 1..10: mol_type = other RNA
tcgagtrcgc

SEQ ID NO: 281-282 - skipped (2 entries)

SEQ ID NO: 283 - RNA, 10 nt, synthetic construct
  misc_feature 1..10: note = intronic recognition element for splicing modifier (REMS)
  source 1..10: mol_type = other RNA
aggagtrcgc

SEQ ID NO: 284 - RNA, 10 nt, synthetic construct
  misc_feature 1..10: note = intronic recognition element for splicing modifier (REMS)
  source 1..10: mol_type = other RNA
cggagtrcgc

SEQ ID NO: 285 - RNA, 10 nt, synthetic construct
  misc_feature 1..10: note = intronic recognition element for splicing modifier (REMS)
  source 1..10: mol_type = other RNA
gggagtrcgc

SEQ ID NO: 286 - RNA, 10 nt, synthetic construct
  misc_feature 1..10: note = intronic recognition element for splicing modifier (REMS)
  source 1..10: mol_type = other RNA
tggagtrcgc

SEQ ID NO: 287-288 - skipped (2 entries)

SEQ ID NO: 289 - RNA, 10 nt, synthetic construct
  misc_feature 1..10: note = intronic recognition element for splicing modifier (REMS)
  source 1..10: mol_type = other RNA
atgagtrcgc

SEQ ID NO: 290 - RNA, 10 nt, synthetic construct
  misc_feature 1..10: note = intronic recognition element for splicing modifier (REMS)
  source 1..10: mol_type = other RNA
ctgagtrcgc

SEQ ID NO: 291 - RNA, 10 nt, synthetic construct
  misc_feature 1..10: note = intronic recognition element for splicing modifier (REMS)
  source 1..10: mol_type = other RNA
gtgagtrcgc

SEQ ID NO: 292 - RNA, 10 nt, synthetic construct
  misc_feature 1..10: note = intronic recognition element for splicing modifier (REMS)
  source 1..10: mol_type = other RNA
ttgagtrcgc

SEQ ID NO: 293-294 - skipped (2 entries)

SEQ ID NO: 295 - RNA, 10 nt, synthetic construct
  misc_feature 1..10: note = intronic recognition element for splicing modifier (REMS)
  source 1..10: mol_type = other RNA
aagagtrggc

SEQ ID NO: 296 - RNA, 10 nt, synthetic construct
  misc_feature 1..10: note = intronic recognition element for splicing modifier (REMS)
  source 1..10: mol_type = other RNA
cagagtrggc

SEQ ID NO: 297 - RNA, 10 nt, synthetic construct
  misc_feature 1..10: note = intronic recognition element for splicing modifier (REMS)
  source 1..10: mol_type = other RNA
gagagtrggc

SEQ ID NO: 298 - RNA, 10 nt, synthetic construct
  misc_feature 1..10: note = intronic recognition element for splicing modifier (REMS)
  source 1..10: mol_type = other RNA
tagagtrggc

SEQ ID NO: 299-300 - skipped (2 entries)

SEQ ID NO: 301 - RNA, 10 nt, synthetic construct
  misc_feature 1..10: note = intronic recognition element for splicing modifier (REMS)
  source 1..10: mol_type = other RNA
acgagtrggc

SEQ ID NO: 302 - RNA, 10 nt, synthetic construct
  misc_feature 1..10: note = intronic recognition element for splicing modifier (REMS)
  source 1..10: mol_type = other RNA
ccgagtrggc

SEQ ID NO: 303 - RNA, 10 nt, synthetic construct
  misc_feature 1..10: note = intronic recognition element for splicing modifier (REMS)
  source 1..10: mol_type = other RNA
gcgagtrggc

SEQ ID NO: 304 - RNA, 10 nt, synthetic construct
  misc_feature 1..10: note = intronic recognition element for splicing modifier (REMS)
  source 1..10: mol_type = other RNA
tcgagtrggc

SEQ ID NO: 305-306 - skipped (2 entries)

SEQ ID NO: 307 - RNA, 10 nt, synthetic construct
  misc_feature 1..10: note = intronic recognition element for splicing modifier (REMS)
  source 1..10: mol_type = other RNA
aggagtrggc

SEQ ID NO: 308 - RNA, 10 nt, synthetic construct
  misc_feature 1..10: note = intronic recognition element for splicing modifier (REMS)
  source 1..10: mol_type = other RNA
cggagtrggc

SEQ ID NO: 309 - RNA, 10 nt, synthetic construct
  misc_feature 1..10: note = intronic recognition element for splicing modifier (REMS)
  source 1..10: mol_type = other RNA
gggagtrggc

SEQ ID NO: 310 - RNA, 10 nt, synthetic construct
  misc_feature 1..10: note = intronic recognition element for splicing modifier (REMS)
  source 1..10: mol_type = other RNA
tggagtrggc

SEQ ID NO: 311-312 - skipped (2 entries)

SEQ ID NO: 313 - RNA, 10 nt, synthetic construct
  misc_feature 1..10: note = intronic recognition element for splicing modifier (REMS)
  source 1..10: mol_type = other RNA
atgagtrggc

SEQ ID NO: 314 - RNA, 10 nt, synthetic construct
  misc_feature 1..10: note = intronic recognition element for splicing modifier (REMS)
  source 1..10: mol_type = other RNA
ctgagtrggc

SEQ ID NO: 315 - RNA, 10 nt, synthetic construct
  misc_feature 1..10: note = intronic recognition element for splicing modifier (REMS)
  source 1..10: mol_type = other RNA
gtgagtrggc

SEQ ID NO: 316 - RNA, 10 nt, synthetic construct
  misc_feature 1..10: note = intronic recognition element for splicing modifier (REMS)
  source 1..10: mol_type = other RNA
ttgagtrggc

SEQ ID NO: 317-318 - skipped (2 entries)

SEQ ID NO: 319 - RNA, 10 nt, synthetic construct
  misc_feature 1..10: note = intronic recognition element for splicing modifier (REMS)
  source 1..10: mol_type = other RNA
aagagtrtgc

SEQ ID NO: 320 - RNA, 10 nt, synthetic construct
  misc_feature 1..10: note = intronic recognition element for splicing modifier (REMS)
  source 1..10: mol_type = other RNA
cagagtrtgc

SEQ ID NO: 321 - RNA, 10 nt, synthetic construct
  misc_feature 1..10: note = intronic recognition element for splicing modifier (REMS)
  source 1..10: mol_type = other RNA
gagagtrtgc

SEQ ID NO: 322 - RNA, 10 nt, synthetic construct
  misc_feature 1..10: note = intronic recognition element for splicing modifier (REMS)
  source 1..10: mol_type = other RNA
tagagtrtgc

SEQ ID NO: 323-324 - skipped (2 entries)

SEQ ID NO: 325 - RNA, 10 nt, synthetic construct
  misc_feature 1..10: note = intronic recognition element for splicing modifier (REMS)
  source 1..10: mol_type = other RNA
acgagtrtgc

SEQ ID NO: 326 - RNA, 10 nt, synthetic construct
  misc_feature 1..10: note = intronic recognition element for splicing modifier (REMS)
  source 1..10: mol_type = other RNA
ccgagtrtgc

SEQ ID NO: 327 - RNA, 10 nt, synthetic construct
  misc_feature 1..10: note = intronic recognition element for splicing modifier (REMS)
  source 1..10: mol_type = other RNA
gcgagtrtgc

SEQ ID NO: 328 - RNA, 10 nt, synthetic construct
  misc_feature 1..10: note = intronic recognition element for splicing modifier (REMS)
  source 1..10: mol_type = other RNA
tcgagtrtgc

SEQ ID NO: 329-330 - skipped (2 entries)

SEQ ID NO: 331 - RNA, 10 nt, synthetic construct
  misc_feature 1..10: note = intronic recognition element for splicing modifier (REMS)
  source 1..10: mol_type = other RNA
aggagtrtgc

SEQ ID NO: 332 - RNA, 10 nt, synthetic construct
  misc_feature 1..10: note = intronic recognition element for splicing modifier (REMS)
  source 1..10: mol_type = other RNA
cggagtrtgc

SEQ ID NO: 333 - RNA, 10 nt, synthetic construct
  misc_feature 1..10: note = intronic recognition element for splicing modifier (REMS)
  source 1..10: mol_type = other RNA
gggagtrtgc

SEQ ID NO: 334 - RNA, 10 nt, synthetic construct
  misc_feature 1..10: note = intronic recognition element for splicing modifier (REMS)
  source 1..10: mol_type = other RNA
tggagtrtgc

SEQ ID NO: 335-336 - skipped (2 entries)

SEQ ID NO: 337 - RNA, 10 nt, synthetic construct
  misc_feature 1..10: note = intronic recognition element for splicing modifier (REMS)
  source 1..10: mol_type = other RNA
atgagtrtgc

SEQ ID NO: 338 - RNA, 10 nt, synthetic construct
  misc_feature 1..10: note = intronic recognition element for splicing modifier (REMS)
  source 1..10: mol_type = other RNA
ctgagtrtgc

SEQ ID NO: 339 - RNA, 10 nt, synthetic construct
  misc_feature 1..10: note = intronic recognition element for splicing modifier (REMS)
  source 1..10: mol_type = other RNA
gtgagtrtgc

SEQ ID NO: 340 - RNA, 10 nt, synthetic construct
  misc_feature 1..10: note = intronic recognition element for splicing modifier (REMS)
  source 1..10: mol_type = other RNA
ttgagtrtgc

SEQ ID NO: 341-342 - skipped (2 entries)

SEQ ID NO: 343 - RNA, 10 nt, synthetic construct
  misc_feature 1..10: note = intronic recognition element for splicing modifier (REMS)
  source 1..10: mol_type = other RNA
aagagtragg

SEQ ID NO: 344 - RNA, 10 nt, synthetic construct
  misc_feature 1..10: note = intronic recognition element for splicing modifier (REMS)
  source 1..10: mol_type = other RNA
cagagtragg

SEQ ID NO: 345 - RNA, 10 nt, synthetic construct
  misc_feature 1..10: note = intronic recognition element for splicing modifier (REMS)
  source 1..10: mol_type = other RNA
gagagtragg

SEQ ID NO: 346 - RNA, 10 nt, synthetic construct
  misc_feature 1..10: note = intronic recognition element for splicing modifier (REMS)
  source 1..10: mol_type = other RNA
tagagtragg

SEQ ID NO: 347-348 - skipped (2 entries)

SEQ ID NO: 349 - RNA, 10 nt, synthetic construct
  misc_feature 1..10: note = intronic recognition element for splicing modifier (REMS)
  source 1..10: mol_type = other RNA
acgagtragg

SEQ ID NO: 350 - RNA, 10 nt, synthetic construct
  misc_feature 1..10: note = intronic recognition element for splicing modifier (REMS)
  source 1..10: mol_type = other RNA
ccgagtragg

SEQ ID NO: 351 - RNA, 10 nt, synthetic construct
  misc_feature 1..10: note = intronic recognition element for splicing modifier (REMS)
  source 1..10: mol_type = other RNA
gcgagtragg

SEQ ID NO: 352 - RNA, 10 nt, synthetic construct
  misc_feature 1..10: note = intronic recognition element for splicing modifier (REMS)
  source 1..10: mol_type = other RNA
tcgagtragg

SEQ ID NO: 353-354 - skipped (2 entries)

SEQ ID NO: 355 - RNA, 10 nt, synthetic construct
  misc_feature 1..10: note = intronic recognition element for splicing modifier (REMS)
  source 1..10: mol_type = other RNA
aggagtragg

SEQ ID NO: 356 - RNA, 10 nt, synthetic construct
  misc_feature 1..10: note = intronic recognition element for splicing modifier (REMS)
  source 1..10: mol_type = other RNA
cggagtragg

SEQ ID NO: 357 - RNA, 10 nt, synthetic construct
  misc_feature 1..10: note = intronic recognition element for splicing modifier (REMS)
  source 1..10: mol_type = other RNA
gggagtragg

SEQ ID NO: 358 - RNA, 10 nt, synthetic construct
  misc_feature 1..10: note = intronic recognition element for splicing modifier (REMS)
  source 1..10: mol_type = other RNA
tggagtragg

SEQ ID NO: 359-360 - skipped (2 entries)

SEQ ID NO: 361 - RNA, 10 nt, synthetic construct
  misc_feature 1..10: note = intronic recognition element for splicing modifier (REMS)
  source 1..10: mol_type = other RNA
atgagtragg

SEQ ID NO: 362 - RNA, 10 nt, synthetic construct
  misc_feature 1..10: note = intronic recognition element for splicing modifier (REMS)
  source 1..10: mol_type = other RNA
ctgagtragg

SEQ ID NO: 363 - RNA, 10 nt, synthetic construct
  misc_feature 1..10: note = intronic recognition element for splicing modifier (REMS)
  source 1..10: mol_type = other RNA
gtgagtragg

SEQ ID NO: 364 - RNA, 10 nt, synthetic construct
  misc_feature 1..10: note = intronic recognition element for splicing modifier (REMS)
  source 1..10: mol_type = other RNA
ttgagtragg

SEQ ID NO: 365-366 - skipped (2 entries)

SEQ ID NO: 367 - RNA, 10 nt, synthetic construct
  misc_feature 1..10: note = intronic recognition element for splicing modifier (REMS)
  source 1..10: mol_type = other RNA
aagagtrcgg

SEQ ID NO: 368 - RNA, 10 nt, synthetic construct
  misc_feature 1..10: note = intronic recognition element for splicing modifier (REMS)
  source 1..10: mol_type = other RNA
cagagtrcgg

SEQ ID NO: 369 - RNA, 10 nt, synthetic construct
  misc_feature 1..10: note = intronic recognition element for splicing modifier (REMS)
  source 1..10: mol_type = other RNA
gagagtrcgg

SEQ ID NO: 370 - RNA, 10 nt, synthetic construct
  misc_feature 1..10: note = intronic recognition element for splicing modifier (REMS)
  source 1..10: mol_type = other RNA
tagagtrcgg

SEQ ID NO: 371-372 - skipped (2 entries)

SEQ ID NO: 373 - RNA, 10 nt, synthetic construct
  misc_feature 1..10: note = intronic recognition element for splicing modifier (REMS)
  source 1..10: mol_type = other RNA
acgagtrcgg

SEQ ID NO: 374 - RNA, 10 nt, synthetic construct
  misc_feature 1..10: note = intronic recognition element for splicing modifier (REMS)
  source 1..10: mol_type = other RNA
ccgagtrcgg

SEQ ID NO: 375 - RNA, 10 nt, synthetic construct
  misc_feature 1..10: note = intronic recognition element for splicing modifier (REMS)
  source 1..10: mol_type = other RNA
gcgagtrcgg

SEQ ID NO: 376 - RNA, 10 nt, synthetic construct
  misc_feature 1..10: note = intronic recognition element for splicing modifier (REMS)
  source 1..10: mol_type = other RNA
tcgagtrcgg

SEQ ID NO: 377-378 - skipped (2 entries)

SEQ ID NO: 379 - RNA, 10 nt, synthetic construct
  misc_feature 1..10: note = intronic recognition element for splicing modifier (REMS)
  source 1..10: mol_type = other RNA
aggagtrcgg

SEQ ID NO: 380 - RNA, 10 nt, synthetic construct
  misc_feature 1..10: note = intronic recognition element for splicing modifier (REMS)
  source 1..10: mol_type = other RNA
cggagtrcgg

SEQ ID NO: 381 - RNA, 10 nt, synthetic construct
  misc_feature 1..10: note = intronic recognition element for splicing modifier (REMS)
  source 1..10: mol_type = other RNA
gggagtrcgg

SEQ ID NO: 382 - RNA, 10 nt, synthetic construct
  misc_feature 1..10: note = intronic recognition element for splicing modifier (REMS)
  source 1..10: mol_type = other RNA
tggagtrcgg

SEQ ID NO: 383-384 - skipped (2 entries)

SEQ ID NO: 385 - RNA, 10 nt, synthetic construct
  misc_feature 1..10: note = intronic recognition element for splicing modifier (REMS)
  source 1..10: mol_type = other RNA
atgagtrcgg

SEQ ID NO: 386 - RNA, 10 nt, synthetic construct
  misc_feature 1..10: note = intronic recognition element for splicing modifier (REMS)
  source 1..10: mol_type = other RNA
ctgagtrcgg

SEQ ID NO: 387 - RNA, 10 nt, synthetic construct
  misc_feature 1..10: note = intronic recognition element for splicing modifier (REMS)
  source 1..10: mol_type = other RNA
gtgagtrcgg

SEQ ID NO: 388 - RNA, 10 nt, synthetic construct
  misc_feature 1..10: note = intronic recognition element for splicing modifier (REMS)
  source 1..10: mol_type = other RNA
ttgagtrcgg

SEQ ID NO: 389-390 - skipped (2 entries)

SEQ ID NO: 391 - RNA, 10 nt, synthetic construct
  misc_feature 1..10: note = intronic recognition element for splicing modifier (REMS)
  source 1..10: mol_type = other RNA
aagagtrggg

SEQ ID NO: 392 - RNA, 10 nt, synthetic construct
  misc_feature 1..10: note = intronic recognition element for splicing modifier (REMS)
  source 1..10: mol_type = other RNA
cagagtrggg

SEQ ID NO: 393 - RNA, 10 nt, synthetic construct
  misc_feature 1..10: note = intronic recognition element for splicing modifier (REMS)
  source 1..10: mol_type = other RNA
gagagtrggg

SEQ ID NO: 394 - RNA, 10 nt, synthetic construct
  misc_feature 1..10: note = intronic recognition element for splicing modifier (REMS)
  source 1..10: mol_type = other RNA
tagagtrggg

SEQ ID NO: 395-396 - skipped (2 entries)

SEQ ID NO: 397 - RNA, 10 nt, synthetic construct
  misc_feature 1..10: note = intronic recognition element for splicing modifier (REMS)
  source 1..10: mol_type = other RNA
acgagtrggg

SEQ ID NO: 398 - RNA, 10 nt, synthetic construct
  misc_feature 1..10: note = intronic recognition element for splicing modifier (REMS)
  source 1..10: mol_type = other RNA
ccgagtrggg

SEQ ID NO: 399 - RNA, 10 nt, synthetic construct
  misc_feature 1..10: note = intronic recognition element for splicing modifier (REMS)
  source 1..10: mol_type = other RNA
gcgagtrggg

SEQ ID NO: 400 - RNA, 10 nt, synthetic construct
  misc_feature 1..10: note = intronic recognition element for splicing modifier (REMS)
  source 1..10: mol_type = other RNA
tcgagtrggg

SEQ ID NO: 401-402 - skipped (2 entries)

SEQ ID NO: 403 - RNA, 10 nt, synthetic construct
  misc_feature 1..10: note = intronic recognition element for splicing modifier (REMS)
  source 1..10: mol_type = other RNA
aggagtrggg

SEQ ID NO: 404 - RNA, 10 nt, synthetic construct
  misc_feature 1..10: note = intronic recognition element for splicing modifier (REMS)
  source 1..10: mol_type = other RNA
cggagtrggg

SEQ ID NO: 405 - RNA, 10 nt, synthetic construct
  misc_feature 1..10: note = intronic recognition element for splicing modifier (REMS)
  source 1..10: mol_type = other RNA
gggagtrggg

SEQ ID NO: 406 - RNA, 10 nt, synthetic construct
  misc_feature 1..10: note = intronic recognition element for splicing modifier (REMS)
  source 1..10: mol_type = other RNA
tggagtrggg

SEQ ID NO: 407-408 - skipped (2 entries)

SEQ ID NO: 409 - RNA, 10 nt, synthetic construct
  misc_feature 1..10: note = intronic recognition element for splicing modifier (REMS)
  source 1..10: mol_type = other RNA
atgagtrggg

SEQ ID NO: 410 - RNA, 10 nt, synthetic construct
  misc_feature 1..10: note = intronic recognition element for splicing modifier (REMS)
  source 1..10: mol_type = other RNA
ctgagtrggg

SEQ ID NO: 411 - RNA, 10 nt, synthetic construct
  misc_feature 1..10: note = intronic recognition element for splicing modifier (REMS)
  source 1..10: mol_type = other RNA
gtgagtrggg

SEQ ID NO: 412 - RNA, 10 nt, synthetic construct
  misc_feature 1..10: note = intronic recognition element for splicing modifier (REMS)
  source 1..10: mol_type = other RNA
ttgagtrggg

SEQ ID NO: 413-414 - skipped (2 entries)

SEQ ID NO: 415 - RNA, 10 nt, synthetic construct
  misc_feature 1..10: note = intronic recognition element for splicing modifier (REMS)
  source 1..10: mol_type = other RNA
aagagtrtgg

SEQ ID NO: 416 - RNA, 10 nt, synthetic construct
  misc_feature 1..10: note = intronic recognition element for splicing modifier (REMS)
  source 1..10: mol_type = other RNA
cagagtrtgg

SEQ ID NO: 417 - RNA, 10 nt, synthetic construct
  misc_feature 1..10: note = intronic recognition element for splicing modifier (REMS)
  source 1..10: mol_type = other RNA
gagagtrtgg

SEQ ID NO: 418 - RNA, 10 nt, synthetic construct
  misc_feature 1..10: note = intronic recognition element for splicing modifier (REMS)
  source 1..10: mol_type = other RNA
tagagtrtgg

SEQ ID NO: 419-420 - skipped (2 entries)

SEQ ID NO: 421 - RNA, 10 nt, synthetic construct
  misc_feature 1..10: note = intronic recognition element for splicing modifier (REMS)
  source 1..10: mol_type = other RNA
acgagtrtgg

SEQ ID NO: 422 - RNA, 10 nt, synthetic construct
  misc_feature 1..10: note = intronic recognition element for splicing modifier (REMS)
  source 1..10: mol_type = other RNA
ccgagtrtgg

SEQ ID NO: 423 - RNA, 10 nt, synthetic construct
  misc_feature 1..10: note = intronic recognition element for splicing modifier (REMS)
  source 1..10: mol_type = other RNA
gcgagtrtgg

SEQ ID NO: 424 - RNA, 10 nt, synthetic construct
  misc_feature 1..10: note = intronic recognition element for splicing modifier (REMS)
  source 1..10: mol_type = other RNA
tcgagtrtgg

SEQ ID NO: 425-426 - skipped (2 entries)

SEQ ID NO: 427 - RNA, 10 nt, synthetic construct
  misc_feature 1..10: note = intronic recognition element for splicing modifier (REMS)
  source 1..10: mol_type = other RNA
aggagtrtgg

SEQ ID NO: 428 - RNA, 10 nt, synthetic construct
  misc_feature 1..10: note = intronic recognition element for splicing modifier (REMS)
  source 1..10: mol_type = other RNA
cggagtrtgg

SEQ ID NO: 429 - RNA, 10 nt, synthetic construct
  misc_feature 1..10: note = intronic recognition element for splicing modifier (REMS)
  source 1..10: mol_type = other RNA
gggagtrtgg

SEQ ID NO: 430 - RNA, 10 nt, synthetic construct
  misc_feature 1..10: note = intronic recognition element for splicing modifier (REMS)
  source 1..10: mol_type = other RNA
tggagtrtgg

SEQ ID NO: 431-432 - skipped (2 entries)

SEQ ID NO: 433 - RNA, 10 nt, synthetic construct
  misc_feature 1..10: note = intronic recognition element for splicing modifier (REMS)
  source 1..10: mol_type = other RNA
atgagtrtgg

SEQ ID NO: 434 - RNA, 10 nt, synthetic construct
  misc_feature 1..10: note = intronic recognition element for splicing modifier (REMS)
  source 1..10: mol_type = other RNA
ctgagtrtgg

SEQ ID NO: 435 - RNA, 10 nt, synthetic construct
  misc_feature 1..10: note = intronic recognition element for splicing modifier (REMS)
  source 1..10: mol_type = other RNA
gtgagtrtgg

SEQ ID NO: 436 - RNA, 10 nt, synthetic construct
  misc_feature 1..10: note = intronic recognition element for splicing modifier (REMS)
  source 1..10: mol_type = other RNA
ttgagtrtgg

SEQ ID NO: 437-438 - skipped (2 entries)

SEQ ID NO: 439 - RNA, 10 nt, synthetic construct
  misc_feature 1..10: note = intronic recognition element for splicing modifier (REMS)
  source 1..10: mol_type = other RNA
aagagtragt

SEQ ID NO: 440 - RNA, 10 nt, synthetic construct
  misc_feature 1..10: note = intronic recognition element for splicing modifier (REMS)
  source 1..10: mol_type = other RNA
cagagtragt

SEQ ID NO: 441 - RNA, 10 nt, synthetic construct
  misc_feature 1..10: note = intronic recognition element for splicing modifier (REMS)
  source 1..10: mol_type = other RNA
gagagtragt

SEQ ID NO: 442 - RNA, 10 nt, synthetic construct
  misc_feature 1..10: note = intronic recognition element for splicing modifier (REMS)
  source 1..10: mol_type = other RNA
tagagtragt

SEQ ID NO: 443-444 - skipped (2 entries)

SEQ ID NO: 445 - RNA, 10 nt, synthetic construct
  misc_feature 1..10: note = intronic recognition element for splicing modifier (REMS)
  source 1..10: mol_type = other RNA
acgagtragt

SEQ ID NO: 446 - RNA, 10 nt, synthetic construct
  misc_feature 1..10: note = intronic recognition element for splicing modifier (REMS)
  source 1..10: mol_type = other RNA
ccgagtragt

SEQ ID NO: 447 - RNA, 10 nt, synthetic construct
  misc_feature 1..10: note = intronic recognition element for splicing modifier (REMS)
  source 1..10: mol_type = other RNA
gcgagtragt

SEQ ID NO: 448 - RNA, 10 nt, synthetic construct
  misc_feature 1..10: note = intronic recognition element for splicing modifier (REMS)
  source 1..10: mol_type = other RNA
tcgagtragt

SEQ ID NO: 449-450 - skipped (2 entries)

SEQ ID NO: 451 - RNA, 10 nt, synthetic construct
  misc_feature 1..10: note = intronic recognition element for splicing modifier (REMS)
  source 1..10: mol_type = other RNA
aggagtragt

SEQ ID NO: 452 - RNA, 10 nt, synthetic construct
  misc_feature 1..10: note = intronic recognition element for splicing modifier (REMS)
  source 1..10: mol_type = other RNA
cggagtragt

SEQ ID NO: 453 - RNA, 10 nt, synthetic construct
  misc_feature 1..10: note = intronic recognition element for splicing modifier (REMS)
  source 1..10: mol_type = other RNA
gggagtragt

SEQ ID NO: 454 - RNA, 10 nt, synthetic construct
  misc_feature 1..10: note = intronic recognition element for splicing modifier (REMS)
  source 1..10: mol_type = other RNA
tggagtragt

SEQ ID NO: 455-456 - skipped (2 entries)

SEQ ID NO: 457 - RNA, 10 nt, synthetic construct
  misc_feature 1..10: note = intronic recognition element for splicing modifier (REMS)
  source 1..10: mol_type = other RNA
atgagtragt

SEQ ID NO: 458 - RNA, 10 nt, synthetic construct
  misc_feature 1..10: note = intronic recognition element for splicing modifier (REMS)
  source 1..10: mol_type = other RNA
ctgagtragt

SEQ ID NO: 459 - RNA, 10 nt, synthetic construct
  misc_feature 1..10: note = intronic recognition element for splicing modifier (REMS)
  source 1..10: mol_type = other RNA
gtgagtragt

SEQ ID NO: 460 - RNA, 10 nt, synthetic construct
  misc_feature 1..10: note = intronic recognition element for splicing modifier (REMS)
  source 1..10: mol_type = other RNA
ttgagtragt

SEQ ID NO: 461-462 - skipped (2 entries)

SEQ ID NO: 463 - RNA, 10 nt, synthetic construct
  misc_feature 1..10: note = intronic recognition element for splicing modifier (REMS)
  source 1..10: mol_type = other RNA
aagagtrcgt

SEQ ID NO: 464 - RNA, 10 nt, synthetic construct
  misc_feature 1..10: note = intronic recognition element for splicing modifier (REMS)
  source 1..10: mol_type = other RNA
cagagtrcgt

SEQ ID NO: 465 - RNA, 10 nt, synthetic construct
  misc_feature 1..10: note = intronic recognition element for splicing modifier (REMS)
  source 1..10: mol_type = other RNA
gagagtrcgt

SEQ ID NO: 466 - RNA, 10 nt, synthetic construct
  misc_feature 1..10: note = intronic recognition element for splicing modifier (REMS)
  source 1..10: mol_type = other RNA
tagagtrcgt

SEQ ID NO: 467-468 - skipped (2 entries)

SEQ ID NO: 469 - RNA, 10 nt, synthetic construct
  misc_feature 1..10: note = intronic recognition element for splicing modifier (REMS)
  source 1..10: mol_type = other RNA
acgagtrcgt

SEQ ID NO: 470 - RNA, 10 nt, synthetic construct
  misc_feature 1..10: note = intronic recognition element for splicing modifier (REMS)
  source 1..10: mol_type = other RNA
ccgagtrcgt

SEQ ID NO: 471 - RNA, 10 nt, synthetic construct
  misc_feature 1..10: note = intronic recognition element for splicing modifier (REMS)
  source 1..10: mol_type = other RNA
gcgagtrcgt

SEQ ID NO: 472 - RNA, 10 nt, synthetic construct
  misc_feature 1..10: note = intronic recognition element for splicing modifier (REMS)
  source 1..10: mol_type = other RNA
tcgagtrcgt

SEQ ID NO: 473-474 - skipped (2 entries)

SEQ ID NO: 475 - RNA, 10 nt, synthetic construct
  misc_feature 1..10: note = intronic recognition element for splicing modifier (REMS)
  source 1..10: mol_type = other RNA
aggagtrcgt

SEQ ID NO: 476 - RNA, 10 nt, synthetic construct
  misc_feature 1..10: note = intronic recognition element for splicing modifier (REMS)
  source 1..10: mol_type = other RNA
cggagtrcgt

SEQ ID NO: 477 - RNA, 10 nt, synthetic construct
  misc_feature 1..10: note = intronic recognition element for splicing modifier (REMS)
  source 1..10: mol_type = other RNA
gggagtrcgt

SEQ ID NO: 478 - RNA, 10 nt, synthetic construct
  misc_feature 1..10: note = intronic recognition element for splicing modifier (REMS)
  source 1..10: mol_type = other RNA
tggagtrcgt

SEQ ID NO: 479-480 - skipped (2 entries)

SEQ ID NO: 481 - RNA, 10 nt, synthetic construct
  misc_feature 1..10: note = intronic recognition element for splicing modifier (REMS)
  source 1..10: mol_type = other RNA
atgagtrcgt

SEQ ID NO: 482 - RNA, 10 nt, synthetic construct
  misc_feature 1..10: note = intronic recognition element for splicing modifier (REMS)
  source 1..10: mol_type = other RNA
ctgagtrcgt

SEQ ID NO: 483 - RNA, 10 nt, synthetic construct
  misc_feature 1..10: note = intronic recognition element for splicing modifier (REMS)
  source 1..10: mol_type = other RNA
gtgagtrcgt

SEQ ID NO: 484 - RNA, 10 nt, synthetic construct
  misc_feature 1..10: note = intronic recognition element for splicing modifier (REMS)
  source 1..10: mol_type = other RNA
ttgagtrcgt

SEQ ID NO: 485-486 - skipped (2 entries)

SEQ ID NO: 487 - RNA, 10 nt, synthetic construct
  misc_feature 1..10: note = intronic recognition element for splicing modifier (REMS)
  source 1..10: mol_type = other RNA
aagagtrggt

SEQ ID NO: 488 - RNA, 10 nt, synthetic construct
  misc_feature 1..10: note = intronic recognition element for splicing modifier (REMS)
  source 1..10: mol_type = other RNA
cagagtrggt

SEQ ID NO: 489 - RNA, 10 nt, synthetic construct
  misc_feature 1..10: note = intronic recognition element for splicing modifier (REMS)
  source 1..10: mol_type = other RNA
gagagtrggt

SEQ ID NO: 490 - RNA, 10 nt, synthetic construct
  misc_feature 1..10: note = intronic recognition element for splicing modifier (REMS)
  source 1..10: mol_type = other RNA
tagagtrggt

SEQ ID NO: 491-492 - skipped (2 entries)

SEQ ID NO: 493 - RNA, 10 nt, synthetic construct
  misc_feature 1..10: note = intronic recognition element for splicing modifier (REMS)
  source 1..10: mol_type = other RNA
acgagtrggt

SEQ ID NO: 494 - RNA, 10 nt, synthetic construct
  misc_feature 1..10: note = intronic recognition element for splicing modifier (REMS)
  source 1..10: mol_type = other RNA
ccgagtrggt

SEQ ID NO: 495 - RNA, 10 nt, synthetic construct
  misc_feature 1..10: note = intronic recognition element for splicing modifier (REMS)
  source 1..10: mol_type = other RNA
gcgagtrggt

SEQ ID NO: 496 - RNA, 10 nt, synthetic construct
  misc_feature 1..10: note = intronic recognition element for splicing modifier (REMS)
  source 1..10: mol_type = other RNA
tcgagtrggt

SEQ ID NO: 497-498 - skipped (2 entries)

SEQ ID NO: 499 - RNA, 10 nt, synthetic construct
  misc_feature 1..10: note = intronic recognition element for splicing modifier (REMS)
  source 1..10: mol_type = other RNA
aggagtrggt

SEQ ID NO: 500 - RNA, 10 nt, synthetic construct
  misc_feature 1..10: note = intronic recognition element for splicing modifier (REMS)
  source 1..10: mol_type = other RNA
cggagtrggt

SEQ ID NO: 501 - RNA, 10 nt, synthetic construct
  misc_feature 1..10: note = intronic recognition element for splicing modifier (REMS)
  source 1..10: mol_type = other RNA
gggagtrggt

SEQ ID NO: 502 - RNA, 10 nt, synthetic construct
  misc_feature 1..10: note = intronic recognition element for splicing modifier (REMS)
  source 1..10: mol_type = other RNA
tggagtrggt

SEQ ID NO: 503-504 - skipped (2 entries)

SEQ ID NO: 505 - RNA, 10 nt, synthetic construct
  misc_feature 1..10: note = intronic recognition element for splicing modifier (REMS)
  source 1..10: mol_type = other RNA
atgagtrggt

SEQ ID NO: 506 - RNA, 10 nt, synthetic construct
  misc_feature 1..10: note = intronic recognition element for splicing modifier (REMS)
  source 1..10: mol_type = other RNA
ctgagtrggt

SEQ ID NO: 507 - RNA, 10 nt, synthetic construct
  misc_feature 1..10: note = intronic recognition element for splicing modifier (REMS)
  source 1..10: mol_type = other RNA
gtgagtrggt

SEQ ID NO: 508 - RNA, 10 nt, synthetic construct
  misc_feature 1..10: note = intronic recognition element for splicing modifier (REMS)
  source 1..10: mol_type = other RNA
ttgagtrggt

SEQ ID NO: 509-510 - skipped (2 entries)

SEQ ID NO: 511 - RNA, 10 nt, synthetic construct
  misc_feature 1..10: note = intronic recognition element for splicing modifier (REMS)
  source 1..10: mol_type = other RNA
aagagtrtgt

SEQ ID NO: 512 - RNA, 10 nt, synthetic construct
  misc_feature 1..10: note = intronic recognition element for splicing modifier (REMS)
  source 1..10: mol_type = other RNA
cagagtrtgt

SEQ ID NO: 513 - RNA, 10 nt, synthetic construct
  misc_feature 1..10: note = intronic recognition element for splicing modifier (REMS)
  source 1..10: mol_type = other RNA
gagagtrtgt

SEQ ID NO: 514 - RNA, 10 nt, synthetic construct
  misc_feature 1..10: note = intronic recognition element for splicing modifier (REMS)
  source 1..10: mol_type = other RNA
tagagtrtgt

SEQ ID NO: 515-516 - skipped (2 entries)

SEQ ID NO: 517 - RNA, 10 nt, synthetic construct
  misc_feature 1..10: note = intronic recognition element for splicing modifier (REMS)
  source 1..10: mol_type = other RNA
acgagtrtgt

SEQ ID NO: 518 - RNA, 10 nt, synthetic construct
  misc_feature 1..10: note = intronic recognition element for splicing modifier (REMS)
  source 1..10: mol_type = other RNA
ccgagtrtgt

SEQ ID NO: 519 - RNA, 10 nt, synthetic construct
  misc_feature 1..10: note = intronic recognition element for splicing modifier (REMS)
  source 1..10: mol_type = other RNA
gcgagtrtgt

SEQ ID NO: 520 - RNA, 10 nt, synthetic construct
  misc_feature 1..10: note = intronic recognition element for splicing modifier (REMS)
  source 1..10: mol_type = other RNA
tcgagtrtgt

SEQ ID NO: 521-522 - skipped (2 entries)

SEQ ID NO: 523 - RNA, 10 nt, synthetic construct
  misc_feature 1..10: note = intronic recognition element for splicing modifier (REMS)
  source 1..10: mol_type = other RNA
aggagtrtgt

SEQ ID NO: 524 - RNA, 10 nt, synthetic construct
  misc_feature 1..10: note = intronic recognition element for splicing modifier (REMS)
  source 1..10: mol_type = other RNA
cggagtrtgt

SEQ ID NO: 525 - RNA, 10 nt, synthetic construct
  misc_feature 1..10: note = intronic recognition element for splicing modifier (REMS)
  source 1..10: mol_type = other RNA
gggagtrtgt

SEQ ID NO: 526 - RNA, 10 nt, synthetic construct
  misc_feature 1..10: note = intronic recognition element for splicing modifier (REMS)
  source 1..10: mol_type = other RNA
tggagtrtgt

SEQ ID NO: 527-528 - skipped (2 entries)

SEQ ID NO: 529 - RNA, 10 nt, synthetic construct
  misc_feature 1..10: note = intronic recognition element for splicing modifier (REMS)
  source 1..10: mol_type = other RNA
atgagtrtgt

SEQ ID NO: 530 - RNA, 10 nt, synthetic construct
  misc_feature 1..10: note = intronic recognition element for splicing modifier (REMS)
  source 1..10: mol_type = other RNA
ctgagtrtgt

SEQ ID NO: 531 - RNA, 10 nt, synthetic construct
  misc_feature 1..10: note = intronic recognition element for splicing modifier (REMS)
  source 1..10: mol_type = other RNA
gtgagtrtgt

SEQ ID NO: 532 - RNA, 10 nt, synthetic construct
  misc_feature 1..10: note = intronic recognition element for splicing modifier (REMS)
  source 1..10: mol_type = other RNA
ttgagtrtgt

SEQ ID NO: 533-750 - skipped (218 entries)

SEQ ID NO: 751 - RNA, 10 nt, synthetic construct
  misc_feature 1..10: note = intronic recognition element for splicing modifier (REMS)
  source 1..10: mol_type = other RNA
aagagtaaga

SEQ ID NO: 752 - RNA, 10 nt, synthetic construct
  misc_feature 1..10: note = intronic recognition element for splicing modifier (REMS)
  source 1..10: mol_type = other RNA
cagagtaaga

SEQ ID NO: 753 - RNA, 10 nt, synthetic construct
  misc_feature 1..10: note = intronic recognition element for splicing modifier (REMS)
  source 1..10: mol_type = other RNA
gagagtaaga

SEQ ID NO: 754 - RNA, 10 nt, synthetic construct
  misc_feature 1..10: note = intronic recognition element for splicing modifier (REMS)
  source 1..10: mol_type = other RNA
tagagtaaga

SEQ ID NO: 755-756 - skipped (2 entries)

SEQ ID NO: 757 - RNA, 10 nt, synthetic construct
  misc_feature 1..10: note = intronic recognition element for splicing modifier (REMS)
  source 1..10: mol_type = other RNA
acgagtaaga

SEQ ID NO: 758 - RNA, 10 nt, synthetic construct
  misc_feature 1..10: note = intronic recognition element for splicing modifier (REMS)
  source 1..10: mol_type = other RNA
ccgagtaaga

SEQ ID NO: 759 - RNA, 10 nt, synthetic construct
  misc_feature 1..10: note = intronic recognition element for splicing modifier (REMS)
  source 1..10: mol_type = other RNA
gcgagtaaga

SEQ ID NO: 760 - RNA, 10 nt, synthetic construct
  misc_feature 1..10: note = intronic recognition element for splicing modifier (REMS)
  source 1..10: mol_type = other RNA
tcgagtaaga

SEQ ID NO: 761-762 - skipped (2 entries)

SEQ ID NO: 763 - RNA, 10 nt, synthetic construct
  misc_feature 1..10: note = intronic recognition element for splicing modifier (REMS)
  source 1..10: mol_type = other RNA
aggagtaaga

SEQ ID NO: 764 - RNA, 10 nt, synthetic construct
  misc_feature 1..10: note = intronic recognition element for splicing modifier (REMS)
  source 1..10: mol_type = other RNA
cggagtaaga

SEQ ID NO: 765 - RNA, 10 nt, synthetic construct
  misc_feature 1..10: note = intronic recognition element for splicing modifier (REMS)
  source 1..10: mol_type = other RNA
gggagtaaga

SEQ ID NO: 766 - RNA, 10 nt, synthetic construct
  misc_feature 1..10: note = intronic recognition element for splicing modifier (REMS)
  source 1..10: mol_type = other RNA
tggagtaaga

SEQ ID NO: 767-768 - skipped (2 entries)

SEQ ID NO: 769 - RNA, 10 nt, synthetic construct
  misc_feature 1..10: note = intronic recognition element for splicing modifier (REMS)
  source 1..10: mol_type = other RNA
atgagtaaga

SEQ ID NO: 770 - RNA, 10 nt, synthetic construct
  misc_feature 1..10: note = intronic recognition element for splicing modifier (REMS)
  source 1..10: mol_type = other RNA
ctgagtaaga

SEQ ID NO: 771 - RNA, 10 nt, synthetic construct
  misc_feature 1..10: note = intronic recognition element for splicing modifier (REMS)
  source 1..10: mol_type = other RNA
gtgagtaaga

SEQ ID NO: 772 - RNA, 10 nt, synthetic construct
  misc_feature 1..10: note = intronic recognition element for splicing modifier (REMS)
  source 1..10: mol_type = other RNA
ttgagtaaga

SEQ ID NO: 773-774 - skipped (2 entries)

SEQ ID NO: 775 - RNA, 10 nt, synthetic construct
  misc_feature 1..10: note = intronic recognition element for splicing modifier (REMS)
  source 1..10: mol_type = other RNA
aagagtacga

SEQ ID NO: 776 - RNA, 10 nt, synthetic construct
  misc_feature 1..10: note = intronic recognition element for splicing modifier (REMS)
  source 1..10: mol_type = other RNA
cagagtacga

SEQ ID NO: 777 - RNA, 10 nt, synthetic construct
  misc_feature 1..10: note = intronic recognition element for splicing modifier (REMS)
  source 1..10: mol_type = other RNA
gagagtacga

SEQ ID NO: 778 - RNA, 10 nt, synthetic construct
  misc_feature 1..10: note = intronic recognition element for splicing modifier (REMS)
  source 1..10: mol_type = other RNA
tagagtacga

SEQ ID NO: 779-780 - skipped (2 entries)

SEQ ID NO: 781 - RNA, 10 nt, synthetic construct
  misc_feature 1..10: note = intronic recognition element for splicing modifier (REMS)
  source 1..10: mol_type = other RNA
acgagtacga

SEQ ID NO: 782 - RNA, 10 nt, synthetic construct
  misc_feature 1..10: note = intronic recognition element for splicing modifier (REMS)
  source 1..10: mol_type = other RNA
ccgagtacga

SEQ ID NO: 783 - RNA, 10 nt, synthetic construct
  misc_feature 1..10: note = intronic recognition element for splicing modifier (REMS)
  source 1..10: mol_type = other RNA
gcgagtacga

SEQ ID NO: 784 - RNA, 10 nt, synthetic construct
  misc_feature 1..10: note = intronic recognition element for splicing modifier (REMS)
  source 1..10: mol_type = other RNA
tcgagtacga

SEQ ID NO: 785-786 - skipped (2 entries)

SEQ ID NO: 787 - RNA, 10 nt, synthetic construct
  misc_feature 1..10: note = intronic recognition element for splicing modifier (REMS)
  source 1..10: mol_type = other RNA
aggagtacga

SEQ ID NO: 788 - RNA, 10 nt, synthetic construct
  misc_feature 1..10: note = intronic recognition element for splicing modifier (REMS)
  source 1..10: mol_type = other RNA
cggagtacga

SEQ ID NO: 789 - RNA, 10 nt, synthetic construct
  misc_feature 1..10: note = intronic recognition element for splicing modifier (REMS)
  source 1..10: mol_type = other RNA
gggagtacga

SEQ ID NO: 790 - RNA, 10 nt, synthetic construct
  misc_feature 1..10: note = intronic recognition element for splicing modifier (REMS)
  source 1..10: mol_type = other RNA
tggagtacga

SEQ ID NO: 791-792 - skipped (2 entries)

SEQ ID NO: 793 - RNA, 10 nt, synthetic construct
  misc_feature 1..10: note = intronic recognition element for splicing modifier (REMS)
  source 1..10: mol_type = other RNA
atgagtacga

SEQ ID NO: 794 - RNA, 10 nt, synthetic construct
  misc_feature 1..10: note = intronic recognition element for splicing modifier (REMS)
  source 1..10: mol_type = other RNA
ctgagtacga

SEQ ID NO: 795 - RNA, 10 nt, synthetic construct
  misc_feature 1..10: note = intronic recognition element for splicing modifier (REMS)
  source 1..10: mol_type = other RNA
gtgagtacga

SEQ ID NO: 796 - RNA, 10 nt, synthetic construct
  misc_feature 1..10: note = intronic recognition element for splicing modifier (REMS)
  source 1..10: mol_type = other RNA
ttgagtacga

SEQ ID NO: 797-798 - skipped (2 entries)

SEQ ID NO: 799 - RNA, 10 nt, synthetic construct
  misc_feature 1..10: note = intronic recognition element for splicing modifier (REMS)
  source 1..10: mol_type = other RNA
aagagtagga

SEQ ID NO: 800 - RNA, 10 nt, synthetic construct
  misc_feature 1..10: note = intronic recognition element for splicing modifier (REMS)
  source 1..10: mol_type = other RNA
cagagtagga

SEQ ID NO: 801 - RNA, 10 nt, synthetic construct
  misc_feature 1..10: note = intronic recognition element for splicing modifier (REMS)
  source 1..10: mol_type = other RNA
gagagtagga

SEQ ID NO: 802 - RNA, 10 nt, synthetic construct
  misc_feature 1..10: note = intronic recognition element for splicing modifier (REMS)
  source 1..10: mol_type = other RNA
tagagtagga

SEQ ID NO: 803-804 - skipped (2 entries)

SEQ ID NO: 805 - RNA, 10 nt, synthetic construct
  misc_feature 1..10: note = intronic recognition element for splicing modifier (REMS)
  source 1..10: mol_type = other RNA
acgagtagga

SEQ ID NO: 806 - RNA, 10 nt, synthetic construct
  misc_feature 1..10: note = intronic recognition element for splicing modifier (REMS)
  source 1..10: mol_type = other RNA
ccgagtagga

SEQ ID NO: 807 - RNA, 10 nt, synthetic construct
  misc_feature 1..10: note = intronic recognition element for splicing modifier (REMS)
  source 1..10: mol_type = other RNA
gcgagtagga

SEQ ID NO: 808 - RNA, 10 nt, synthetic construct
  misc_feature 1..10: note = intronic recognition element for splicing modifier (REMS)
  source 1..10: mol_type = other RNA
tcgagtagga

SEQ ID NO: 809-810 - skipped (2 entries)

SEQ ID NO: 811 - RNA, 10 nt, synthetic construct
  misc_feature 1..10: note = intronic recognition element for splicing modifier (REMS)
  source 1..10: mol_type = other RNA
aggagtagga

SEQ ID NO: 812 - RNA, 10 nt, synthetic construct
  misc_feature 1..10: note = intronic recognition element for splicing modifier (REMS)
  source 1..10: mol_type = other RNA
cggagtagga

SEQ ID NO: 813 - RNA, 10 nt, synthetic construct
  misc_feature 1..10: note = intronic recognition element for splicing modifier (REMS)
  source 1..10: mol_type = other RNA
gggagtagga

SEQ ID NO: 814 - RNA, 10 nt, synthetic construct
  misc_feature 1..10: note = intronic recognition element for splicing modifier (REMS)
  source 1..10: mol_type = other RNA
tggagtagga

SEQ ID NO: 815-816 - skipped (2 entries)

SEQ ID NO: 817 - RNA, 10 nt, synthetic construct
  misc_feature 1..10: note = intronic recognition element for splicing modifier (REMS)
  source 1..10: mol_type = other RNA
atgagtagga

SEQ ID NO: 818 - RNA, 10 nt, synthetic construct
  misc_feature 1..10: note = intronic recognition element for splicing modifier (REMS)
  source 1..10: mol_type = other RNA
ctgagtagga

SEQ ID NO: 819 - RNA, 10 nt, synthetic construct
  misc_feature 1..10: note = intronic recognition element for splicing modifier (REMS)
  source 1..10: mol_type = other RNA
gtgagtagga

SEQ ID NO: 820 - RNA, 10 nt, synthetic construct
  misc_feature 1..10: note = intronic recognition element for splicing modifier (REMS)
  source 1..10: mol_type = other RNA
ttgagtagga

SEQ ID NO: 821-822 - skipped (2 entries)

SEQ ID NO: 823 - RNA, 10 nt, synthetic construct
  misc_feature 1..10: note = intronic recognition element for splicing modifier (REMS)
  source 1..10: mol_type = other RNA
aagagtatga

SEQ ID NO: 824 - RNA, 10 nt, synthetic construct
  misc_feature 1..10: note = intronic recognition element for splicing modifier (REMS)
  source 1..10: mol_type = other RNA
cagagtatga

SEQ ID NO: 825 - RNA, 10 nt, synthetic construct
  misc_feature 1..10: note = intronic recognition element for splicing modifier (REMS)
  source 1..10: mol_type = other RNA
gagagtatga

SEQ ID NO: 826 - RNA, 10 nt, synthetic construct
  misc_feature 1..10: note = intronic recognition element for splicing modifier (REMS)
  source 1..10: mol_type = other RNA
tagagtatga

SEQ ID NO: 827-828 - skipped (2 entries)

SEQ ID NO: 829 - RNA, 10 nt, synthetic construct
  misc_feature 1..10: note = intronic recognition element for splicing modifier (REMS)
  source 1..10: mol_type = other RNA
acgagtatga

SEQ ID NO: 830 - RNA, 10 nt, synthetic construct
  misc_feature 1..10: note = intronic recognition element for splicing modifier (REMS)
  source 1..10: mol_type = other RNA
ccgagtatga

SEQ ID NO: 831 - RNA, 10 nt, synthetic construct
  misc_feature 1..10: note = intronic recognition element for splicing modifier (REMS)
  source 1..10: mol_type = other RNA
gcgagtatga

SEQ ID NO: 832 - RNA, 10 nt, synthetic construct
  misc_feature 1..10: note = intronic recognition element for splicing modifier (REMS)
  source 1..10: mol_type = other RNA
tcgagtatga

SEQ ID NO: 833-834 - skipped (2 entries)

SEQ ID NO: 835 - RNA, 10 nt, synthetic construct
  misc_feature 1..10: note = intronic recognition element for splicing modifier (REMS)
  source 1..10: mol_type = other RNA
aggagtatga

SEQ ID NO: 836 - RNA, 10 nt, synthetic construct
  misc_feature 1..10: note = intronic recognition element for splicing modifier (REMS)
  source 1..10: mol_type = other RNA
cggagtatga

SEQ ID NO: 837 - RNA, 10 nt, synthetic construct
  misc_feature 1..10: note = intronic recognition element for splicing modifier (REMS)
  source 1..10: mol_type = other RNA
gggagtatga

SEQ ID NO: 838 - RNA, 10 nt, synthetic construct
  misc_feature 1..10: note = intronic recognition element for splicing modifier (REMS)
  source 1..10: mol_type = other RNA
tggagtatga

SEQ ID NO: 839-840 - skipped (2 entries)

SEQ ID NO: 841 - RNA, 10 nt, synthetic construct
  misc_feature 1..10: note = intronic recognition element for splicing modifier (REMS)
  source 1..10: mol_type = other RNA
atgagtatga

SEQ ID NO: 842 - RNA, 10 nt, synthetic construct
  misc_feature 1..10: note = intronic recognition element for splicing modifier (REMS)
  source 1..10: mol_type = other RNA
ctgagtatga

SEQ ID NO: 843 - RNA, 10 nt, synthetic construct
  misc_feature 1..10: note = intronic recognition element for splicing modifier (REMS)
  source 1..10: mol_type = other RNA
gtgagtatga

SEQ ID NO: 844 - RNA, 10 nt, synthetic construct
  misc_feature 1..10: note = intronic recognition element for splicing modifier (REMS)
  source 1..10: mol_type = other RNA
ttgagtatga

SEQ ID NO: 845-846 - skipped (2 entries)

SEQ ID NO: 847 - RNA, 10 nt, synthetic construct
  misc_feature 1..10: note = intronic recognition element for splicing modifier (REMS)
  source 1..10: mol_type = other RNA
aagagtaagc

SEQ ID NO: 848 - RNA, 10 nt, synthetic construct
  misc_feature 1..10: note = intronic recognition element for splicing modifier (REMS)
  source 1..10: mol_type = other RNA
cagagtaagc

SEQ ID NO: 849 - RNA, 10 nt, synthetic construct
  misc_feature 1..10: note = intronic recognition element for splicing modifier (REMS)
  source 1..10: mol_type = other RNA
gagagtaagc

SEQ ID NO: 850 - RNA, 10 nt, synthetic construct
  misc_feature 1..10: note = intronic recognition element for splicing modifier (REMS)
  source 1..10: mol_type = other RNA
tagagtaagc

SEQ ID NO: 851-852 - skipped (2 entries)

SEQ ID NO: 853 - RNA, 10 nt, synthetic construct
  misc_feature 1..10: note = intronic recognition element for splicing modifier (REMS)
  source 1..10: mol_type = other RNA
acgagtaagc

SEQ ID NO: 854 - RNA, 10 nt, synthetic construct
  misc_feature 1..10: note = intronic recognition element for splicing modifier (REMS)
  source 1..10: mol_type = other RNA
ccgagtaagc

SEQ ID NO: 855 - RNA, 10 nt, synthetic construct
  misc_feature 1..10: note = intronic recognition element for splicing modifier (REMS)
  source 1..10: mol_type = other RNA
gcgagtaagc

SEQ ID NO: 856 - RNA, 10 nt, synthetic construct
  misc_feature 1..10: note = intronic recognition element for splicing modifier (REMS)
  source 1..10: mol_type = other RNA
tcgagtaagc

SEQ ID NO: 857-858 - skipped (2 entries)

SEQ ID NO: 859 - RNA, 10 nt, synthetic construct
  misc_feature 1..10: note = intronic recognition element for splicing modifier (REMS)
  source 1..10: mol_type = other RNA
aggagtaagc

SEQ ID NO: 860 - RNA, 10 nt, synthetic construct
  misc_feature 1..10: note = intronic recognition element for splicing modifier (REMS)
  source 1..10: mol_type = other RNA
cggagtaagc

SEQ ID NO: 861 - RNA, 10 nt, synthetic construct
  misc_feature 1..10: note = intronic recognition element for splicing modifier (REMS)
  source 1..10: mol_type = other RNA
gggagtaagc

SEQ ID NO: 862 - RNA, 10 nt, synthetic construct
  misc_feature 1..10: note = intronic recognition element for splicing modifier (REMS)
  source 1..10: mol_type = other RNA
tggagtaagc

SEQ ID NO: 863-864 - skipped (2 entries)

SEQ ID NO: 865 - RNA, 10 nt, synthetic construct
  misc_feature 1..10: note = intronic recognition element for splicing modifier (REMS)
  source 1..10: mol_type = other RNA
atgagtaagc

SEQ ID NO: 866 - RNA, 10 nt, synthetic construct
  misc_feature 1..10: note = intronic recognition element for splicing modifier (REMS)
  source 1..10: mol_type = other RNA
ctgagtaagc

SEQ ID NO: 867 - RNA, 10 nt, synthetic construct
  misc_feature 1..10: note = intronic recognition element for splicing modifier (REMS)
  source 1..10: mol_type = other RNA
gtgagtaagc

SEQ ID NO: 868 - RNA, 10 nt, synthetic construct
  misc_feature 1..10: note = intronic recognition element for splicing modifier (REMS)
  source 1..10: mol_type = other RNA
ttgagtaagc

SEQ ID NO: 869-870 - skipped (2 entries)

SEQ ID NO: 871 - RNA, 10 nt, synthetic construct
  misc_feature 1..10: note = intronic recognition element for splicing modifier (REMS)
  source 1..10: mol_type = other RNA
aagagtacgc

SEQ ID NO: 872 - RNA, 10 nt, synthetic construct
  misc_feature 1..10: note = intronic recognition element for splicing modifier (REMS)
  source 1..10: mol_type = other RNA
cagagtacgc

SEQ ID NO: 873 - RNA, 10 nt, synthetic construct
  misc_feature 1..10: note = intronic recognition element for splicing modifier (REMS)
  source 1..10: mol_type = other RNA
gagagtacgc

SEQ ID NO: 874 - RNA, 10 nt, synthetic construct
  misc_feature 1..10: note = intronic recognition element for splicing modifier (REMS)
  source 1..10: mol_type = other RNA
tagagtacgc

SEQ ID NO: 875-876 - skipped (2 entries)

SEQ ID NO: 877 - RNA, 10 nt, synthetic construct
  misc_feature 1..10: note = intronic recognition element for splicing modifier (REMS)
  source 1..10: mol_type = other RNA
acgagtacgc

SEQ ID NO: 878 - RNA, 10 nt, synthetic construct
  misc_feature 1..10: note = intronic recognition element for splicing modifier (REMS)
  source 1..10: mol_type = other RNA
ccgagtacgc

SEQ ID NO: 879 - RNA, 10 nt, synthetic construct
  misc_feature 1..10: note = intronic recognition element for splicing modifier (REMS)
  source 1..10: mol_type = other RNA
gcgagtacgc

SEQ ID NO: 880 - RNA, 10 nt, synthetic construct
  misc_feature 1..10: note = intronic recognition element for splicing modifier (REMS)
  source 1..10: mol_type = other RNA
tcgagtacgc

SEQ ID NO: 881-882 - skipped (2 entries)

SEQ ID NO: 883 - RNA, 10 nt, synthetic construct
  misc_feature 1..10: note = intronic recognition element for splicing modifier (REMS)
  source 1..10: mol_type = other RNA
aggagtacgc

SEQ ID NO: 884 - RNA, 10 nt, synthetic construct
  misc_feature 1..10: note = intronic recognition element for splicing modifier (REMS)
  source 1..10: mol_type = other RNA
cggagtacgc

SEQ ID NO: 885 - RNA, 10 nt, synthetic construct
  misc_feature 1..10: note = intronic recognition element for splicing modifier (REMS)
  source 1..10: mol_type = other RNA
gggagtacgc

SEQ ID NO: 886 - RNA, 10 nt, synthetic construct
  misc_feature 1..10: note = intronic recognition element for splicing modifier (REMS)
  source 1..10: mol_type = other RNA
tggagtacgc

SEQ ID NO: 887-888 - skipped (2 entries)

SEQ ID NO: 889 - RNA, 10 nt, synthetic construct
  misc_feature 1..10: note = intronic recognition element for splicing modifier (REMS)
  source 1..10: mol_type = other RNA
atgagtacgc

SEQ ID NO: 890 - RNA, 10 nt, synthetic construct
  misc_feature 1..10: note = intronic recognition element for splicing modifier (REMS)
  source 1..10: mol_type = other RNA
ctgagtacgc

SEQ ID NO: 891 - RNA, 10 nt, synthetic construct
  misc_feature 1..10: note = intronic recognition element for splicing modifier (REMS)
  source 1..10: mol_type = other RNA
gtgagtacgc

SEQ ID NO: 892 - RNA, 10 nt, synthetic construct
  misc_feature 1..10: note = intronic recognition element for splicing modifier (REMS)
  source 1..10: mol_type = other RNA
ttgagtacgc

SEQ ID NO: 893-894 - skipped (2 entries)

SEQ ID NO: 895 - RNA, 10 nt, synthetic construct
  misc_feature 1..10: note = intronic recognition element for splicing modifier (REMS)
  source 1..10: mol_type = other RNA
aagagtaggc

SEQ ID NO: 896 - RNA, 10 nt, synthetic construct
  misc_feature 1..10: note = intronic recognition element for splicing modifier (REMS)
  source 1..10: mol_type = other RNA
cagagtaggc

SEQ ID NO: 897 - RNA, 10 nt, synthetic construct
  misc_feature 1..10: note = intronic recognition element for splicing modifier (REMS)
  source 1..10: mol_type = other RNA
gagagtaggc

SEQ ID NO: 898 - RNA, 10 nt, synthetic construct
  misc_feature 1..10: note = intronic recognition element for splicing modifier (REMS)
  source 1..10: mol_type = other RNA
tagagtaggc

SEQ ID NO: 899-900 - skipped (2 entries)

SEQ ID NO: 901 - RNA, 10 nt, synthetic construct
  misc_feature 1..10: note = intronic recognition element for splicing modifier (REMS)
  source 1..10: mol_type = other RNA
acgagtaggc

SEQ ID NO: 902 - RNA, 10 nt, synthetic construct
  misc_feature 1..10: note = intronic recognition element for splicing modifier (REMS)
  source 1..10: mol_type = other RNA
ccgagtaggc

SEQ ID NO: 903 - RNA, 10 nt, synthetic construct
  misc_feature 1..10: note = intronic recognition element for splicing modifier (REMS)
  source 1..10: mol_type = other RNA
gcgagtaggc

SEQ ID NO: 904 - RNA, 10 nt, synthetic construct
  misc_feature 1..10: note = intronic recognition element for splicing modifier (REMS)
  source 1..10: mol_type = other RNA
tcgagtaggc

SEQ ID NO: 905-906 - skipped (2 entries)

SEQ ID NO: 907 - RNA, 10 nt, synthetic construct
  misc_feature 1..10: note = intronic recognition element for splicing modifier (REMS)
  source 1..10: mol_type = other RNA
aggagtaggc

SEQ ID NO: 908 - RNA, 10 nt, synthetic construct
  misc_feature 1..10: note = intronic recognition element for splicing modifier (REMS)
  source 1..10: mol_type = other RNA
cggagtaggc

SEQ ID NO: 909 - RNA, 10 nt, synthetic construct
  misc_feature 1..10: note = intronic recognition element for splicing modifier (REMS)
  source 1..10: mol_type = other RNA
gggagtaggc

SEQ ID NO: 910 - RNA, 10 nt, synthetic construct
  misc_feature 1..10: note = intronic recognition element for splicing modifier (REMS)
  source 1..10: mol_type = other RNA
tggagtaggc

SEQ ID NO: 911-912 - skipped (2 entries)

SEQ ID NO: 913 - RNA, 10 nt, synthetic construct
  misc_feature 1..10: note = intronic recognition element for splicing modifier (REMS)
  source 1..10: mol_type = other RNA
atgagtaggc

SEQ ID NO: 914 - RNA, 10 nt, synthetic construct
  misc_feature 1..10: note = intronic recognition element for splicing modifier (REMS)
  source 1..10: mol_type = other RNA
ctgagtaggc

SEQ ID NO: 915 - RNA, 10 nt, synthetic construct
  misc_feature 1..10: note = intronic recognition element for splicing modifier (REMS)
  source 1..10: mol_type = other RNA
gtgagtaggc

SEQ ID NO: 916 - RNA, 10 nt, synthetic construct
  misc_feature 1..10: note = intronic recognition element for splicing modifier (REMS)
  source 1..10: mol_type = other RNA
ttgagtaggc

SEQ ID NO: 917-918 - skipped (2 entries)

SEQ ID NO: 919 - RNA, 10 nt, synthetic construct
  misc_feature 1..10: note = intronic recognition element for splicing modifier (REMS)
  source 1..10: mol_type = other RNA
aagagtatgc

SEQ ID NO: 920 - RNA, 10 nt, synthetic construct
  misc_feature 1..10: note = intronic recognition element for splicing modifier (REMS)
  source 1..10: mol_type = other RNA
cagagtatgc

SEQ ID NO: 921 - RNA, 10 nt, synthetic construct
  misc_feature 1..10: note = intronic recognition element for splicing modifier (REMS)
  source 1..10: mol_type = other RNA
gagagtatgc

SEQ ID NO: 922 - RNA, 10 nt, synthetic construct
  misc_feature 1..10: note = intronic recognition element for splicing modifier (REMS)
  source 1..10: mol_type = other RNA
tagagtatgc

SEQ ID NO: 923-924 - skipped (2 entries)

SEQ ID NO: 925 - RNA, 10 nt, synthetic construct
  misc_feature 1..10: note = intronic recognition element for splicing modifier (REMS)
  source 1..10: mol_type = other RNA
acgagtatgc

SEQ ID NO: 926 - RNA, 10 nt, synthetic construct
  misc_feature 1..10: note = intronic recognition element for splicing modifier (REMS)
  source 1..10: mol_type = other RNA
ccgagtatgc

SEQ ID NO: 927 - RNA, 10 nt, synthetic construct
  misc_feature 1..10: note = intronic recognition element for splicing modifier (REMS)
  source 1..10: mol_type = other RNA
gcgagtatgc

SEQ ID NO: 928 - RNA, 10 nt, synthetic construct
  misc_feature 1..10: note = intronic recognition element for splicing modifier (REMS)
  source 1..10: mol_type = other RNA
tcgagtatgc

SEQ ID NO: 929-930 - skipped (2 entries)

SEQ ID NO: 931 - RNA, 10 nt, synthetic construct
  misc_feature 1..10: note = intronic recognition element for splicing modifier (REMS)
  source 1..10: mol_type = other RNA
aggagtatgc

SEQ ID NO: 932 - RNA, 10 nt, synthetic construct
  misc_feature 1..10: note = intronic recognition element for splicing modifier (REMS)
  source 1..10: mol_type = other RNA
cggagtatgc

SEQ ID NO: 933 - RNA, 10 nt, synthetic construct
  misc_feature 1..10: note = intronic recognition element for splicing modifier (REMS)
  source 1..10: mol_type = other RNA
gggagtatgc

SEQ ID NO: 934 - RNA, 10 nt, synthetic construct
  misc_feature 1..10: note = intronic recognition element for splicing modifier (REMS)
  source 1..10: mol_type = other RNA
tggagtatgc

SEQ ID NO: 935-936 - skipped (2 entries)

SEQ ID NO: 937 - RNA, 10 nt, synthetic construct
  misc_feature 1..10: note = intronic recognition element for splicing modifier (REMS)
  source 1..10: mol_type = other RNA
atgagtatgc

SEQ ID NO: 938 - RNA, 10 nt, synthetic construct
  misc_feature 1..10: note = intronic recognition element for splicing modifier (REMS)
  source 1..10: mol_type = other RNA
ctgagtatgc

SEQ ID NO: 939 - RNA, 10 nt, synthetic construct
  misc_feature 1..10: note = intronic recognition element for splicing modifier (REMS)
  source 1..10: mol_type = other RNA
gtgagtatgc

SEQ ID NO: 940 - RNA, 10 nt, synthetic construct
  misc_feature 1..10: note = intronic recognition element for splicing modifier (REMS)
  source 1..10: mol_type = other RNA
ttgagtatgc

SEQ ID NO: 941-942 - skipped (2 entries)

SEQ ID NO: 943 - RNA, 10 nt, synthetic construct
  misc_feature 1..10: note = intronic recognition element for splicing modifier (REMS)
  source 1..10: mol_type = other RNA
aagagtaagg

SEQ ID NO: 944 - RNA, 10 nt, synthetic construct
  misc_feature 1..10: note = intronic recognition element for splicing modifier (REMS)
  source 1..10: mol_type = other RNA
cagagtaagg

SEQ ID NO: 945 - RNA, 10 nt, synthetic construct
  misc_feature 1..10: note = intronic recognition element for splicing modifier (REMS)
  source 1..10: mol_type = other RNA
gagagtaagg

SEQ ID NO: 946 - RNA, 10 nt, synthetic construct
  misc_feature 1..10: note = intronic recognition element for splicing modifier (REMS)
  source 1..10: mol_type = other RNA
tagagtaagg

SEQ ID NO: 947-948 - skipped (2 entries)

SEQ ID NO: 949 - RNA, 10 nt, synthetic construct
  misc_feature 1..10: note = intronic recognition element for splicing modifier (REMS)
  source 1..10: mol_type = other RNA
acgagtaagg

SEQ ID NO: 950 - RNA, 10 nt, synthetic construct
  misc_feature 1..10: note = intronic recognition element for splicing modifier (REMS)
  source 1..10: mol_type = other RNA
ccgagtaagg

SEQ ID NO: 951 - RNA, 10 nt, synthetic construct
  misc_feature 1..10: note = intronic recognition element for splicing modifier (REMS)
  source 1..10: mol_type = other RNA
gcgagtaagg

SEQ ID NO: 952 - RNA, 10 nt, synthetic construct
  misc_feature 1..10: note = intronic recognition element for splicing modifier (REMS)
  source 1..10: mol_type = other RNA
tcgagtaagg

SEQ ID NO: 953-954 - skipped (2 entries)

SEQ ID NO: 955 - RNA, 10 nt, synthetic construct
  misc_feature 1..10: note = intronic recognition element for splicing modifier (REMS)
  source 1..10: mol_type = other RNA
aggagtaagg

SEQ ID NO: 956 - RNA, 10 nt, synthetic construct
  misc_feature 1..10: note = intronic recognition element for splicing modifier (REMS)
  source 1..10: mol_type = other RNA
cggagtaagg

SEQ ID NO: 957 - RNA, 10 nt, synthetic construct
  misc_feature 1..10: note = intronic recognition element for splicing modifier (REMS)
  source 1..10: mol_type = other RNA
gggagtaagg

SEQ ID NO: 958 - RNA, 10 nt, synthetic construct
  misc_feature 1..10: note = intronic recognition element for splicing modifier (REMS)
  source 1..10: mol_type = other RNA
tggagtaagg

SEQ ID NO: 959-960 - skipped (2 entries)

SEQ ID NO: 961 - RNA, 10 nt, synthetic construct
  misc_feature 1..10: note = intronic recognition element for splicing modifier (REMS)
  source 1..10: mol_type = other RNA
atgagtaagg

SEQ ID NO: 962 - RNA, 10 nt, synthetic construct
  misc_feature 1..10: note = intronic recognition element for splicing modifier (REMS)
  source 1..10: mol_type = other RNA
ctgagtaagg

SEQ ID NO: 963 - RNA, 10 nt, synthetic construct
  misc_feature 1..10: note = intronic recognition element for splicing modifier (REMS)
  source 1..10: mol_type = other RNA
gtgagtaagg

SEQ ID NO: 964 - RNA, 10 nt, synthetic construct
  misc_feature 1..10: note = intronic recognition element for splicing modifier (REMS)
  source 1..10: mol_type = other RNA
ttgagtaagg

SEQ ID NO: 965-966 - skipped (2 entries)

SEQ ID NO: 967 - RNA, 10 nt, synthetic construct
  misc_feature 1..10: note = intronic recognition element for splicing modifier (REMS)
  source 1..10: mol_type = other RNA
aagagtacgg

SEQ ID NO: 968 - RNA, 10 nt, synthetic construct
  misc_feature 1..10: note = intronic recognition element for splicing modifier (REMS)
  source 1..10: mol_type = other RNA
cagagtacgg

SEQ ID NO: 969 - RNA, 10 nt, synthetic construct
  misc_feature 1..10: note = intronic recognition element for splicing modifier (REMS)
  source 1..10: mol_type = other RNA
gagagtacgg

SEQ ID NO: 970 - RNA, 10 nt, synthetic construct
  misc_feature 1..10: note = intronic recognition element for splicing modifier (REMS)
  source 1..10: mol_type = other RNA
tagagtacgg

SEQ ID NO: 971-972 - skipped (2 entries)

SEQ ID NO: 973 - RNA, 10 nt, synthetic construct
  misc_feature 1..10: note = intronic recognition element for splicing modifier (REMS)
  source 1..10: mol_type = other RNA
acgagtacgg

SEQ ID NO: 974 - RNA, 10 nt, synthetic construct
  misc_feature 1..10: note = intronic recognition element for splicing modifier (REMS)
  source 1..10: mol_type = other RNA
ccgagtacgg

SEQ ID NO: 975 - RNA, 10 nt, synthetic construct
  misc_feature 1..10: note = intronic recognition element for splicing modifier (REMS)
  source 1..10: mol_type = other RNA
gcgagtacgg

SEQ ID NO: 976 - RNA, 10 nt, synthetic construct
  misc_feature 1..10: note = intronic recognition element for splicing modifier (REMS)
  source 1..10: mol_type = other RNA
tcgagtacgg

SEQ ID NO: 977-978 - skipped (2 entries)

SEQ ID NO: 979 - RNA, 10 nt, synthetic construct
  misc_feature 1..10: note = intronic recognition element for splicing modifier (REMS)
  source 1..10: mol_type = other RNA
aggagtacgg

SEQ ID NO: 980 - RNA, 10 nt, synthetic construct
  misc_feature 1..10: note = intronic recognition element for splicing modifier (REMS)
  source 1..10: mol_type = other RNA
cggagtacgg

SEQ ID NO: 981 - RNA, 10 nt, synthetic construct
  misc_feature 1..10: note = intronic recognition element for splicing modifier (REMS)
  source 1..10: mol_type = other RNA
gggagtacgg

SEQ ID NO: 982 - RNA, 10 nt, synthetic construct
  misc_feature 1..10: note = intronic recognition element for splicing modifier (REMS)
  source 1..10: mol_type = other RNA
tggagtacgg

SEQ ID NO: 983-984 - skipped (2 entries)

SEQ ID NO: 985 - RNA, 10 nt, synthetic construct
  misc_feature 1..10: note = intronic recognition element for splicing modifier (REMS)
  source 1..10: mol_type = other RNA
atgagtacgg

SEQ ID NO: 986 - RNA, 10 nt, synthetic construct
  misc_feature 1..10: note = intronic recognition element for splicing modifier (REMS)
  source 1..10: mol_type = other RNA
ctgagtacgg

SEQ ID NO: 987 - RNA, 10 nt, synthetic construct
  misc_feature 1..10: note = intronic recognition element for splicing modifier (REMS)
  source 1..10: mol_type = other RNA
gtgagtacgg

SEQ ID NO: 988 - RNA, 10 nt, synthetic construct
  misc_feature 1..10: note = intronic recognition element for splicing modifier (REMS)
  source 1..10: mol_type = other RNA
ttgagtacgg

SEQ ID NO: 989-990 - skipped (2 entries)

SEQ ID NO: 991 - RNA, 10 nt, synthetic construct
  misc_feature 1..10: note = intronic recognition element for splicing modifier (REMS)
  source 1..10: mol_type = other RNA
aagagtaggg

SEQ ID NO: 992 - RNA, 10 nt, synthetic construct
  misc_feature 1..10: note = intronic recognition element for splicing modifier (REMS)
  source 1..10: mol_type = other RNA
cagagtaggg

SEQ ID NO: 993 - RNA, 10 nt, synthetic construct
  misc_feature 1..10: note = intronic recognition element for splicing modifier (REMS)
  source 1..10: mol_type = other RNA
gagagtaggg

SEQ ID NO: 994 - RNA, 10 nt, synthetic construct
  misc_feature 1..10: note = intronic recognition element for splicing modifier (REMS)
  source 1..10: mol_type = other RNA
tagagtaggg

SEQ ID NO: 995-996 - skipped (2 entries)

SEQ ID NO: 997 - RNA, 10 nt, synthetic construct
  misc_feature 1..10: note = intronic recognition element for splicing modifier (REMS)
  source 1..10: mol_type = other RNA
acgagtaggg

SEQ ID NO: 998 - RNA, 10 nt, synthetic construct
  misc_feature 1..10: note = intronic recognition element for splicing modifier (REMS)
  source 1..10: mol_type = other RNA
ccgagtaggg

SEQ ID NO: 999 - RNA, 10 nt, synthetic construct
  misc_feature 1..10: note = intronic recognition element for splicing modifier (REMS)
  source 1..10: mol_type = other RNA
gcgagtaggg

SEQ ID NO: 1000 - RNA, 10 nt, synthetic construct
  misc_feature 1..10: note = intronic recognition element for splicing modifier (REMS)
  source 1..10: mol_type = other RNA
tcgagtaggg

SEQ ID NO: 1001-1002 - skipped (2 entries)

SEQ ID NO: 1003 - RNA, 10 nt, synthetic construct
  misc_feature 1..10: note = intronic recognition element for splicing modifier (REMS)
  source 1..10: mol_type = other RNA
aggagtaggg

SEQ ID NO: 1004 - RNA, 10 nt, synthetic construct
  misc_feature 1..10: note = intronic recognition element for splicing modifier (REMS)
  source 1..10: mol_type = other RNA
cggagtaggg

SEQ ID NO: 1005 - RNA, 10 nt, synthetic construct
  misc_feature 1..10: note = intronic recognition element for splicing modifier (REMS)
  source 1..10: mol_type = other RNA
gggagtaggg

SEQ ID NO: 1006 - RNA, 10 nt, synthetic construct
  misc_feature 1..10: note = intronic recognition element for splicing modifier (REMS)
  source 1..10: mol_type = other RNA
tggagtaggg

SEQ ID NO: 1007-1008 - skipped (2 entries)

SEQ ID NO: 1009 - RNA, 10 nt, synthetic construct
  misc_feature 1..10: note = intronic recognition element for splicing modifier (REMS)
  source 1..10: mol_type = other RNA
atgagtaggg

SEQ ID NO: 1010 - RNA, 10 nt, synthetic construct
  misc_feature 1..10: note = intronic recognition element for splicing modifier (REMS)
  source 1..10: mol_type = other RNA
ctgagtaggg

SEQ ID NO: 1011 - RNA, 10 nt, synthetic construct
  misc_feature 1..10: note = intronic recognition element for splicing modifier (REMS)
  source 1..10: mol_type = other RNA
gtgagtaggg

SEQ ID NO: 1012 - RNA, 10 nt, synthetic construct
  misc_feature 1..10: note = intronic recognition element for splicing modifier (REMS)
  source 1..10: mol_type = other RNA
ttgagtaggg

SEQ ID NO: 1013-1014 - skipped (2 entries)

SEQ ID NO: 1015 - RNA, 10 nt, synthetic construct
  misc_feature 1..10: note = intronic recognition element for splicing modifier (REMS)
  source 1..10: mol_type = other RNA
aagagtatgg

SEQ ID NO: 1016 - RNA, 10 nt, synthetic construct
  misc_feature 1..10: note = intronic recognition element for splicing modifier (REMS)
  source 1..10: mol_type = other RNA
cagagtatgg

SEQ ID NO: 1017 - RNA, 10 nt, synthetic construct
  misc_feature 1..10: note = intronic recognition element for splicing modifier (REMS)
  source 1..10: mol_type = other RNA
gagagtatgg

SEQ ID NO: 1018 - RNA, 10 nt, synthetic construct
  misc_feature 1..10: note = intronic recognition element for splicing modifier (REMS)
  source 1..10: mol_type = other RNA
tagagtatgg

SEQ ID NO: 1019-1020 - skipped (2 entries)

SEQ ID NO: 1021 - RNA, 10 nt, synthetic construct
  misc_feature 1..10: note = intronic recognition element for splicing modifier (REMS)
  source 1..10: mol_type = other RNA
acgagtatgg

SEQ ID NO: 1022 - RNA, 10 nt, synthetic construct
  misc_feature 1..10: note = intronic recognition element for splicing modifier (REMS)
  source 1..10: mol_type = other RNA
ccgagtatgg

SEQ ID NO: 1023 - RNA, 10 nt, synthetic construct
  misc_feature 1..10: note = intronic recognition element for splicing modifier (REMS)
  source 1..10: mol_type = other RNA
gcgagtatgg

SEQ ID NO: 1024 - RNA, 10 nt, synthetic construct
  misc_feature 1..10: note = intronic recognition element for splicing modifier (REMS)
  source 1..10: mol_type = other RNA
tcgagtatgg

SEQ ID NO: 1025-1026 - skipped (2 entries)

SEQ ID NO: 1027 - RNA, 10 nt, synthetic construct
  misc_feature 1..10: note = intronic recognition element for splicing modifier (REMS)
  source 1..10: mol_type = other RNA
aggagtatgg

SEQ ID NO: 1028 - RNA, 10 nt, synthetic construct
  misc_feature 1..10: note = intronic recognition element for splicing modifier (REMS)
  source 1..10: mol_type = other RNA
cggagtatgg

SEQ ID NO: 1029 - RNA, 10 nt, synthetic construct
  misc_feature 1..10: note = intronic recognition element for splicing modifier (REMS)
  source 1..10: mol_type = other RNA
gggagtatgg

SEQ ID NO: 1030 - RNA, 10 nt, synthetic construct
  misc_feature 1..10: note = intronic recognition element for splicing modifier (REMS)
  source 1..10: mol_type = other RNA
tggagtatgg

SEQ ID NO: 1031-1032 - skipped (2 entries)

SEQ ID NO: 1033 - RNA, 10 nt, synthetic construct
  misc_feature 1..10: note = intronic recognition element for splicing modifier (REMS)
  source 1..10: mol_type = other RNA
atgagtatgg

SEQ ID NO: 1034 - RNA, 10 nt, synthetic construct
  misc_feature 1..10: note = intronic recognition element for splicing modifier (REMS)
  source 1..10: mol_type = other RNA
ctgagtatgg

SEQ ID NO: 1035 - RNA, 10 nt, synthetic construct
  misc_feature 1..10: note = intronic recognition element for splicing modifier (REMS)
  source 1..10: mol_type = other RNA
gtgagtatgg

SEQ ID NO: 1036 - RNA, 10 nt, synthetic construct
  misc_feature 1..10: note = intronic recognition element for splicing modifier (REMS)
  source 1..10: mol_type = other RNA
ttgagtatgg

SEQ ID NO: 1037-1038 - skipped (2 entries)

SEQ ID NO: 1039 - RNA, 10 nt, synthetic construct
  misc_feature 1..10: note = intronic recognition element for splicing modifier (REMS)
  source 1..10: mol_type = other RNA
aagagtaagt

SEQ ID NO: 1040 - RNA, 10 nt, synthetic construct
  misc_feature 1..10: note = intronic recognition element for splicing modifier (REMS)
  source 1..10: mol_type = other RNA
cagagtaagt

SEQ ID NO: 1041 - RNA, 10 nt, synthetic construct
  misc_feature 1..10: note = intronic recognition element for splicing modifier (REMS)
  source 1..10: mol_type = other RNA
gagagtaagt

SEQ ID NO: 1042 - RNA, 10 nt, synthetic construct
  misc_feature 1..10: note = intronic recognition element for splicing modifier (REMS)
  source 1..10: mol_type = other RNA
tagagtaagt

SEQ ID NO: 1043-1044 - skipped (2 entries)

SEQ ID NO: 1045 - RNA, 10 nt, synthetic construct
  misc_feature 1..10: note = intronic recognition element for splicing modifier (REMS)
  source 1..10: mol_type = other RNA
acgagtaagt

SEQ ID NO: 1046 - RNA, 10 nt, synthetic construct
  misc_feature 1..10: note = intronic recognition element for splicing modifier (REMS)
  source 1..10: mol_type = other RNA
ccgagtaagt

SEQ ID NO: 1047 - RNA, 10 nt, synthetic construct
  misc_feature 1..10: note = intronic recognition element for splicing modifier (REMS)
  source 1..10: mol_type = other RNA
gcgagtaagt

SEQ ID NO: 1048 - RNA, 10 nt, synthetic construct
  misc_feature 1..10: note = intronic recognition element for splicing modifier (REMS)
  source 1..10: mol_type = other RNA
tcgagtaagt

SEQ ID NO: 1049-1050 - skipped (2 entries)

SEQ ID NO: 1051 - RNA, 10 nt, synthetic construct
  misc_feature 1..10: note = intronic recognition element for splicing modifier (REMS)
  source 1..10: mol_type = other RNA
aggagtaagt

SEQ ID NO: 1052 - RNA, 10 nt, synthetic construct
  misc_feature 1..10: note = intronic recognition element for splicing modifier (REMS)
  source 1..10: mol_type = other RNA
cggagtaagt

SEQ ID NO: 1053 - RNA, 10 nt, synthetic construct
  misc_feature 1..10: note = intronic recognition element for splicing modifier (REMS)
  source 1..10: mol_type = other RNA
gggagtaagt

SEQ ID NO: 1054 - RNA, 10 nt, synthetic construct
  misc_feature 1..10: note = intronic recognition element for splicing modifier (REMS)
  source 1..10: mol_type = other RNA
tggagtaagt

SEQ ID NO: 1055-1056 - skipped (2 entries)

SEQ ID NO: 1057 - RNA, 10 nt, synthetic construct
  misc_feature 1..10: note = intronic recognition element for splicing modifier (REMS)
  source 1..10: mol_type = other RNA
atgagtaagt

SEQ ID NO: 1058 - RNA, 10 nt, synthetic construct
  misc_feature 1..10: note = intronic recognition element for splicing modifier (REMS)
  source 1..10: mol_type = other RNA
ctgagtaagt

SEQ ID NO: 1059 - RNA, 10 nt, synthetic construct
  misc_feature 1..10: note = intronic recognition element for splicing modifier (REMS)
  source 1..10: mol_type = other RNA
gtgagtaagt

SEQ ID NO: 1060 - RNA, 10 nt, synthetic construct
  misc_feature 1..10: note = intronic recognition element for splicing modifier (REMS)
  source 1..10: mol_type = other RNA
ttgagtaagt

SEQ ID NO: 1061-1062 - skipped (2 entries)

SEQ ID NO: 1063 - RNA, 10 nt, synthetic construct
  misc_feature 1..10: note = intronic recognition element for splicing modifier (REMS)
  source 1..10: mol_type = other RNA
aagagtacgt

SEQ ID NO: 1064 - RNA, 10 nt, synthetic construct
  misc_feature 1..10: note = intronic recognition element for splicing modifier (REMS)
  source 1..10: mol_type = other RNA
cagagtacgt

SEQ ID NO: 1065 - RNA, 10 nt, synthetic construct
  misc_feature 1..10: note = intronic recognition element for splicing modifier (REMS)
  source 1..10: mol_type = other RNA
gagagtacgt

SEQ ID NO: 1066 - RNA, 10 nt, synthetic construct
  misc_feature 1..10: note = intronic recognition element for splicing modifier (REMS)
  source 1..10: mol_type = other RNA
tagagtacgt

SEQ ID NO: 1067-1068 - skipped (2 entries)

SEQ ID NO: 1069 - RNA, 10 nt, synthetic construct
  misc_feature 1..10: note = intronic recognition element for splicing modifier (REMS)
  source 1..10: mol_type = other RNA
acgagtacgt

SEQ ID NO: 1070 - RNA, 10 nt, synthetic construct
  misc_feature 1..10: note = intronic recognition element for splicing modifier (REMS)
  source 1..10: mol_type = other RNA
ccgagtacgt

SEQ ID NO: 1071 - RNA, 10 nt, synthetic construct
  misc_feature 1..10: note = intronic recognition element for splicing modifier (REMS)
  source 1..10: mol_type = other RNA
gcgagtacgt

SEQ ID NO: 1072 - RNA, 10 nt, synthetic construct
  misc_feature 1..10: note = intronic recognition element for splicing modifier (REMS)
  source 1..10: mol_type = other RNA
tcgagtacgt

SEQ ID NO: 1073-1074 - skipped (2 entries)

SEQ ID NO: 1075 - RNA, 10 nt, synthetic construct
  misc_feature 1..10: note = intronic recognition element for splicing modifier (REMS)
  source 1..10: mol_type = other RNA
aggagtacgt

SEQ ID NO: 1076 - RNA, 10 nt, synthetic construct
  misc_feature 1..10: note = intronic recognition element for splicing modifier (REMS)
  source 1..10: mol_type = other RNA
cggagtacgt

SEQ ID NO: 1077 - RNA, 10 nt, synthetic construct
  misc_feature 1..10: note = intronic recognition element for splicing modifier (REMS)
  source 1..10: mol_type = other RNA
gggagtacgt

SEQ ID NO: 1078 - RNA, 10 nt, synthetic construct
  misc_feature 1..10: note = intronic recognition element for splicing modifier (REMS)
  source 1..10: mol_type = other RNA
tggagtacgt

SEQ ID NO: 1079-1080 - skipped (2 entries)

SEQ ID NO: 1081 - RNA, 10 nt, synthetic construct
  misc_feature 1..10: note = intronic recognition element for splicing modifier (REMS)
  source 1..10: mol_type = other RNA
atgagtacgt

SEQ ID NO: 1082 - RNA, 10 nt, synthetic construct
  misc_feature 1..10: note = intronic recognition element for splicing modifier (REMS)
  source 1..10: mol_type = other RNA
ctgagtacgt

SEQ ID NO: 1083 - RNA, 10 nt, synthetic construct
  misc_feature 1..10: note = intronic recognition element for splicing modifier (REMS)
  source 1..10: mol_type = other RNA
gtgagtacgt

SEQ ID NO: 1084 - RNA, 10 nt, synthetic construct
  misc_feature 1..10: note = intronic recognition element for splicing modifier (REMS)
  source 1..10: mol_type = other RNA
ttgagtacgt

SEQ ID NO: 1085-1086 - skipped (2 entries)

SEQ ID NO: 1087 - RNA, 10 nt, synthetic construct
  misc_feature 1..10: note = intronic recognition element for splicing modifier (REMS)
  source 1..10: mol_type = other RNA
aagagtaggt

SEQ ID NO: 1088 - RNA, 10 nt, synthetic construct
  misc_feature 1..10: note = intronic recognition element for splicing modifier (REMS)
  source 1..10: mol_type = other RNA
cagagtaggt

SEQ ID NO: 1089 - RNA, 10 nt, synthetic construct
  misc_feature 1..10: note = intronic recognition element for splicing modifier (REMS)
  source 1..10: mol_type = other RNA
gagagtaggt

SEQ ID NO: 1090 - RNA, 10 nt, synthetic construct
  misc_feature 1..10: note = intronic recognition element for splicing modifier (REMS)
  source 1..10: mol_type = other RNA
tagagtaggt

SEQ ID NO: 1091-1092 - skipped (2 entries)

SEQ ID NO: 1093 - RNA, 10 nt, synthetic construct
  misc_feature 1..10: note = intronic recognition element for splicing modifier (REMS)
  source 1..10: mol_type = other RNA
acgagtaggt

SEQ ID NO: 1094 - RNA, 10 nt, synthetic construct
  misc_feature 1..10: note = intronic recognition element for splicing modifier (REMS)
  source 1..10: mol_type = other RNA
ccgagtaggt

SEQ ID NO: 1095 - RNA, 10 nt, synthetic construct
  misc_feature 1..10: note = intronic recognition element for splicing modifier (REMS)
  source 1..10: mol_type = other RNA
gcgagtaggt

SEQ ID NO: 1096 - RNA, 10 nt, synthetic construct
  misc_feature 1..10: note = intronic recognition element for splicing modifier (REMS)
  source 1..10: mol_type = other RNA
tcgagtaggt

SEQ ID NO: 1097-1098 - skipped (2 entries)

SEQ ID NO: 1099 - RNA, 10 nt, synthetic construct
  misc_feature 1..10: note = intronic recognition element for splicing modifier (REMS)
  source 1..10: mol_type = other RNA
aggagtaggt

SEQ ID NO: 1100 - RNA, 10 nt, synthetic construct
  misc_feature 1..10: note = intronic recognition element for splicing modifier (REMS)
  source 1..10: mol_type = other RNA
cggagtaggt

SEQ ID NO: 1101 - RNA, 10 nt, synthetic construct
  misc_feature 1..10: note = intronic recognition element for splicing modifier (REMS)
  source 1..10: mol_type = other RNA
gggagtaggt

SEQ ID NO: 1102 - RNA, 10 nt, synthetic construct
  misc_feature 1..10: note = intronic recognition element for splicing modifier (REMS)
  source 1..10: mol_type = other RNA
tggagtaggt

SEQ ID NO: 1103-1104 - skipped (2 entries)

SEQ ID NO: 1105 - RNA, 10 nt, synthetic construct
  misc_feature 1..10: note = intronic recognition element for splicing modifier (REMS)
  source 1..10: mol_type = other RNA
atgagtaggt

SEQ ID NO: 1106 - RNA, 10 nt, synthetic construct
  misc_feature 1..10: note = intronic recognition element for splicing modifier (REMS)
  source 1..10: mol_type = other RNA
ctgagtaggt

SEQ ID NO: 1107 - RNA, 10 nt, synthetic construct
  misc_feature 1..10: note = intronic recognition element for splicing modifier (REMS)
  source 1..10: mol_type = other RNA
gtgagtaggt

SEQ ID NO: 1108 - RNA, 10 nt, synthetic construct
  misc_feature 1..10: note = intronic recognition element for splicing modifier (REMS)
  source 1..10: mol_type = other RNA
ttgagtaggt

SEQ ID NO: 1109-1110 - skipped (2 entries)

SEQ ID NO: 1111 - RNA, 10 nt, synthetic construct
  misc_feature 1..10: note = intronic recognition element for splicing modifier (REMS)
  source 1..10: mol_type = other RNA
aagagtatgt

SEQ ID NO: 1112 - RNA, 10 nt, synthetic construct
  misc_feature 1..10: note = intronic recognition element for splicing modifier (REMS)
  source 1..10: mol_type = other RNA
cagagtatgt

SEQ ID NO: 1113 - RNA, 10 nt, synthetic construct
  misc_feature 1..10: note = intronic recognition element for splicing modifier (REMS)
  source 1..10: mol_type = other RNA
gagagtatgt

SEQ ID NO: 1114 - RNA, 10 nt, synthetic construct
  misc_feature 1..10: note = intronic recognition element for splicing modifier (REMS)
  source 1..10: mol_type = other RNA
tagagtatgt

SEQ ID NO: 1115-1116 - skipped (2 entries)

SEQ ID NO: 1117 - RNA, 10 nt, synthetic construct
  misc_feature 1..10: note = intronic recognition element for splicing modifier (REMS)
  source 1..10: mol_type = other RNA
acgagtatgt

SEQ ID NO: 1118 - RNA, 10 nt, synthetic construct
  misc_feature 1..10: note = intronic recognition element for splicing modifier (REMS)
  source 1..10: mol_type = other RNA
ccgagtatgt

SEQ ID NO: 1119 - RNA, 10 nt, synthetic construct
  misc_feature 1..10: note = intronic recognition element for splicing modifier (REMS)
  source 1..10: mol_type = other RNA
gcgagtatgt

SEQ ID NO: 1120 - RNA, 10 nt, synthetic construct
  misc_feature 1..10: note = intronic recognition element for splicing modifier (REMS)
  source 1..10: mol_type = other RNA
tcgagtatgt

SEQ ID NO: 1121-1122 - skipped (2 entries)

SEQ ID NO: 1123 - RNA, 10 nt, synthetic construct
  misc_feature 1..10: note = intronic recognition element for splicing modifier (REMS)
  source 1..10: mol_type = other RNA
aggagtatgt

SEQ ID NO: 1124 - RNA, 10 nt, synthetic construct
  misc_feature 1..10: note = intronic recognition element for splicing modifier (REMS)
  source 1..10: mol_type = other RNA
cggagtatgt

SEQ ID NO: 1125 - RNA, 10 nt, synthetic construct
  misc_feature 1..10: note = intronic recognition element for splicing modifier (REMS)
  source 1..10: mol_type = other RNA
gggagtatgt

SEQ ID NO: 1126 - RNA, 10 nt, synthetic construct
  misc_feature 1..10: note = intronic recognition element for splicing modifier (REMS)
  source 1..10: mol_type = other RNA
tggagtatgt

SEQ ID NO: 1127-1128 - skipped (2 entries)

SEQ ID NO: 1129 - RNA, 10 nt, synthetic construct
  misc_feature 1..10: note = intronic recognition element for splicing modifier (REMS)
  source 1..10: mol_type = other RNA
atgagtatgt

SEQ ID NO: 1130 - RNA, 10 nt, synthetic construct
  misc_feature 1..10: note = intronic recognition element for splicing modifier (REMS)
  source 1..10: mol_type = other RNA
ctgagtatgt

SEQ ID NO: 1131 - RNA, 10 nt, synthetic construct
  misc_feature 1..10: note = intronic recognition element for splicing modifier (REMS)
  source 1..10: mol_type = other RNA
gtgagtatgt

SEQ ID NO: 1132 - RNA, 10 nt, synthetic construct
  misc_feature 1..10: note = intronic recognition element for splicing modifier (REMS)
  source 1..10: mol_type = other RNA
ttgagtatgt

SEQ ID NO: 1133-1350 - skipped (218 entries)

SEQ ID NO: 1351 - RNA, 10 nt, synthetic construct
  misc_feature 1..10: note = intronic recognition element for splicing modifier (REMS)
  source 1..10: mol_type = other RNA
aagagtgaga

SEQ ID NO: 1352 - RNA, 10 nt, synthetic construct
  misc_feature 1..10: note = intronic recognition element for splicing modifier (REMS)
  source 1..10: mol_type = other RNA
cagagtgaga

SEQ ID NO: 1353 - RNA, 10 nt, synthetic construct
  misc_feature 1..10: note = intronic recognition element for splicing modifier (REMS)
  source 1..10: mol_type = other RNA
gagagtgaga

SEQ ID NO: 1354 - RNA, 10 nt, synthetic construct
  misc_feature 1..10: note = intronic recognition element for splicing modifier (REMS)
  source 1..10: mol_type = other RNA
tagagtgaga

SEQ ID NO: 1355-1356 - skipped (2 entries)

SEQ ID NO: 1357 - RNA, 10 nt, synthetic construct
  misc_feature 1..10: note = intronic recognition element for splicing modifier (REMS)
  source 1..10: mol_type = other RNA
acgagtgaga

SEQ ID NO: 1358 - RNA, 10 nt, synthetic construct
  misc_feature 1..10: note = intronic recognition element for splicing modifier (REMS)
  source 1..10: mol_type = other RNA
ccgagtgaga

SEQ ID NO: 1359 - RNA, 10 nt, synthetic construct
  misc_feature 1..10: note = intronic recognition element for splicing modifier (REMS)
  source 1..10: mol_type = other RNA
gcgagtgaga

SEQ ID NO: 1360 - RNA, 10 nt, synthetic construct
  misc_feature 1..10: note = intronic recognition element for splicing modifier (REMS)
  source 1..10: mol_type = other RNA
tcgagtgaga

SEQ ID NO: 1361-1362 - skipped (2 entries)

SEQ ID NO: 1363 - RNA, 10 nt, synthetic construct
  misc_feature 1..10: note = intronic recognition element for splicing modifier (REMS)
  source 1..10: mol_type = other RNA
aggagtgaga

SEQ ID NO: 1364 - RNA, 10 nt, synthetic construct
  misc_feature 1..10: note = intronic recognition element for splicing modifier (REMS)
  source 1..10: mol_type = other RNA
cggagtgaga

SEQ ID NO: 1365 - RNA, 10 nt, synthetic construct
  misc_feature 1..10: note = intronic recognition element for splicing modifier (REMS)
  source 1..10: mol_type = other RNA
gggagtgaga

SEQ ID NO: 1366 - RNA, 10 nt, synthetic construct
  misc_feature 1..10: note = intronic recognition element for splicing modifier (REMS)
  source 1..10: mol_type = other RNA
tggagtgaga

SEQ ID NO: 1367-1368 - skipped (2 entries)

SEQ ID NO: 1369 - RNA, 10 nt, synthetic construct
  misc_feature 1..10: note = intronic recognition element for splicing modifier (REMS)
  source 1..10: mol_type = other RNA
atgagtgaga

SEQ ID NO: 1370 - RNA, 10 nt, synthetic construct
  misc_feature 1..10: note = intronic recognition element for splicing modifier (REMS)
  source 1..10: mol_type = other RNA
ctgagtgaga

SEQ ID NO: 1371 - RNA, 10 nt, synthetic construct
  misc_feature 1..10: note = intronic recognition element for splicing modifier (REMS)
  source 1..10: mol_type = other RNA
gtgagtgaga

SEQ ID NO: 1372 - RNA, 10 nt, synthetic construct
  misc_feature 1..10: note = intronic recognition element for splicing modifier (REMS)
  source 1..10: mol_type = other RNA
ttgagtgaga

SEQ ID NO: 1373-1374 - skipped (2 entries)

SEQ ID NO: 1375 - RNA, 10 nt, synthetic construct
  misc_feature 1..10: note = intronic recognition element for splicing modifier (REMS)
  source 1..10: mol_type = other RNA
aagagtgcga

SEQ ID NO: 1376 - RNA, 10 nt, synthetic construct
  misc_feature 1..10: note = intronic recognition element for splicing modifier (REMS)
  source 1..10: mol_type = other RNA
cagagtgcga

SEQ ID NO: 1377 - RNA, 10 nt, synthetic construct
  misc_feature 1..10: note = intronic recognition element for splicing modifier (REMS)
  source 1..10: mol_type = other RNA
gagagtgcga

SEQ ID NO: 1378 - RNA, 10 nt, synthetic construct
  misc_feature 1..10: note = intronic recognition element for splicing modifier (REMS)
  source 1..10: mol_type = other RNA
tagagtgcga

SEQ ID NO: 1379-1380 - skipped (2 entries)

SEQ ID NO: 1381 - RNA, 10 nt, synthetic construct
  misc_feature 1..10: note = intronic recognition element for splicing modifier (REMS)
  source 1..10: mol_type = other RNA
acgagtgcga

SEQ ID NO: 1382 - RNA, 10 nt, synthetic construct
  misc_feature 1..10: note = intronic recognition element for splicing modifier (REMS)
  source 1..10: mol_type = other RNA
ccgagtgcga

SEQ ID NO: 1383 - RNA, 10 nt, synthetic construct
  misc_feature 1..10: note = intronic recognition element for splicing modifier (REMS)
  source 1..10: mol_type = other RNA
gcgagtgcga

SEQ ID NO: 1384 - RNA, 10 nt, synthetic construct
  misc_feature 1..10: note = intronic recognition element for splicing modifier (REMS)
  source 1..10: mol_type = other RNA
tcgagtgcga

SEQ ID NO: 1385-1386 - skipped (2 entries)

SEQ ID NO: 1387 - RNA, 10 nt, synthetic construct
  misc_feature 1..10: note = intronic recognition element for splicing modifier (REMS)
  source 1..10: mol_type = other RNA
aggagtgcga

SEQ ID NO: 1388 - RNA, 10 nt, synthetic construct
  misc_feature 1..10: note = intronic recognition element for splicing modifier (REMS)
  source 1..10: mol_type = other RNA
cggagtgcga

SEQ ID NO: 1389 - RNA, 10 nt, synthetic construct
  misc_feature 1..10: note = intronic recognition element for splicing modifier (REMS)
  source 1..10: mol_type = other RNA
gggagtgcga

SEQ ID NO: 1390 - RNA, 10 nt, synthetic construct
  misc_feature 1..10: note = intronic recognition element for splicing modifier (REMS)
  source 1..10: mol_type = other RNA
tggagtgcga

SEQ ID NO: 1391-1392 - skipped (2 entries)

SEQ ID NO: 1393 - RNA, 10 nt, synthetic construct
  misc_feature 1..10: note = intronic recognition element for splicing modifier (REMS)
  source 1..10: mol_type = other RNA
atgagtgcga

SEQ ID NO: 1394 - RNA, 10 nt, synthetic construct
  misc_feature 1..10: note = intronic recognition element for splicing modifier (REMS)
  source 1..10: mol_type = other RNA
ctgagtgcga

SEQ ID NO: 1395 - RNA, 10 nt, synthetic construct
  misc_feature 1..10: note = intronic recognition element for splicing modifier (REMS)
  source 1..10: mol_type = other RNA
gtgagtgcga

SEQ ID NO: 1396 - RNA, 10 nt, synthetic construct
  misc_feature 1..10: note = intronic recognition element for splicing modifier (REMS)
  source 1..10: mol_type = other RNA
ttgagtgcga

SEQ ID NO: 1397-1398 - skipped (2 entries)

SEQ ID NO: 1399 - RNA, 10 nt, synthetic construct
  misc_feature 1..10: note = intronic recognition element for splicing modifier (REMS)
  source 1..10: mol_type = other RNA
aagagtggga

SEQ ID NO: 1400 - RNA, 10 nt, synthetic construct
  misc_feature 1..10: note = intronic recognition element for splicing modifier (REMS)
  source 1..10: mol_type = other RNA
cagagtggga

SEQ ID NO: 1401 - RNA, 10 nt, synthetic construct
  misc_feature 1..10: note = intronic recognition element for splicing modifier (REMS)
  source 1..10: mol_type = other RNA
gagagtggga

SEQ ID NO: 1402 - RNA, 10 nt, synthetic construct
  misc_feature 1..10: note = intronic recognition element for splicing modifier (REMS)
  source 1..10: mol_type = other RNA
tagagtggga

SEQ ID NO: 1403-1404 - skipped (2 entries)

SEQ ID NO: 1405 - RNA, 10 nt, synthetic construct
  misc_feature 1..10: note = intronic recognition element for splicing modifier (REMS)
  source 1..10: mol_type = other RNA
acgagtggga

SEQ ID NO: 1406 - RNA, 10 nt, synthetic construct
  misc_feature 1..10: note = intronic recognition element for splicing modifier (REMS)
  source 1..10: mol_type = other RNA
ccgagtggga

SEQ ID NO: 1407 - RNA, 10 nt, synthetic construct
  misc_feature 1..10: note = intronic recognition element for splicing modifier (REMS)
  source 1..10: mol_type = other RNA
gcgagtggga

SEQ ID NO: 1408 - RNA, 10 nt, synthetic construct
  misc_feature 1..10: note = intronic recognition element for splicing modifier (REMS)
  source 1..10: mol_type = other RNA
tcgagtggga

SEQ ID NO: 1409-1410 - skipped (2 entries)

SEQ ID NO: 1411 - RNA, 10 nt, synthetic construct
  misc_feature 1..10: note = intronic recognition element for splicing modifier (REMS)
  source 1..10: mol_type = other RNA
aggagtggga

SEQ ID NO: 1412 - RNA, 10 nt, synthetic construct
  misc_feature 1..10: note = intronic recognition element for splicing modifier (REMS)
  source 1..10: mol_type = other RNA
cggagtggga

SEQ ID NO: 1413 - RNA, 10 nt, synthetic construct
  misc_feature 1..10: note = intronic recognition element for splicing modifier (REMS)
  source 1..10: mol_type = other RNA
gggagtggga

SEQ ID NO: 1414 - RNA, 10 nt, synthetic construct
  misc_feature 1..10: note = intronic recognition element for splicing modifier (REMS)
  source 1..10: mol_type = other RNA
tggagtggga

SEQ ID NO: 1415-1416 - skipped (2 entries)

SEQ ID NO: 1417 - RNA, 10 nt, synthetic construct
  misc_feature 1..10: note = intronic recognition element for splicing modifier (REMS)
  source 1..10: mol_type = other RNA
atgagtggga

SEQ ID NO: 1418 - RNA, 10 nt, synthetic construct
  misc_feature 1..10: note = intronic recognition element for splicing modifier (REMS)
  source 1..10: mol_type = other RNA
ctgagtggga

SEQ ID NO: 1419 - RNA, 10 nt, synthetic construct
  misc_feature 1..10: note = intronic recognition element for splicing modifier (REMS)
  source 1..10: mol_type = other RNA
gtgagtggga

SEQ ID NO: 1420 - RNA, 10 nt, synthetic construct
  misc_feature 1..10: note = intronic recognition element for splicing modifier (REMS)
  source 1..10: mol_type = other RNA
ttgagtggga

SEQ ID NO: 1421-1422 - skipped (2 entries)

SEQ ID NO: 1423 - RNA, 10 nt, synthetic construct
  misc_feature 1..10: note = intronic recognition element for splicing modifier (REMS)
  source 1..10: mol_type = other RNA
aagagtgtga

SEQ ID NO: 1424 - RNA, 10 nt, synthetic construct
  misc_feature 1..10: note = intronic recognition element for splicing modifier (REMS)
  source 1..10: mol_type = other RNA
cagagtgtga

SEQ ID NO: 1425 - RNA, 10 nt, synthetic construct
  misc_feature 1..10: note = intronic recognition element for splicing modifier (REMS)
  source 1..10: mol_type = other RNA
gagagtgtga

SEQ ID NO: 1426 - RNA, 10 nt, synthetic construct
  misc_feature 1..10: note = intronic recognition element for splicing modifier (REMS)
  source 1..10: mol_type = other RNA
tagagtgtga

SEQ ID NO: 1427-1428 - skipped (2 entries)

SEQ ID NO: 1429 - RNA, 10 nt, synthetic construct
  misc_feature 1..10: note = intronic recognition element for splicing modifier (REMS)
  source 1..10: mol_type = other RNA
acgagtgtga

SEQ ID NO: 1430 - RNA, 10 nt, synthetic construct
  misc_feature 1..10: note = intronic recognition element for splicing modifier (REMS)
  source 1..10: mol_type = other RNA
ccgagtgtga

SEQ ID NO: 1431 - RNA, 10 nt, synthetic construct
  misc_feature 1..10: note = intronic recognition element for splicing modifier (REMS)
  source 1..10: mol_type = other RNA
gcgagtgtga

SEQ ID NO: 1432 - RNA, 10 nt, synthetic construct
  misc_feature 1..10: note = intronic recognition element for splicing modifier (REMS)
  source 1..10: mol_type = other RNA
tcgagtgtga

SEQ ID NO: 1433-1434 - skipped (2 entries)

SEQ ID NO: 1435 - RNA, 10 nt, synthetic construct
  misc_feature 1..10: note = intronic recognition element for splicing modifier (REMS)
  source 1..10: mol_type = other RNA
aggagtgtga

SEQ ID NO: 1436 - RNA, 10 nt, synthetic construct
  misc_feature 1..10: note = intronic recognition element for splicing modifier (REMS)
  source 1..10: mol_type = other RNA
cggagtgtga

SEQ ID NO: 1437 - RNA, 10 nt, synthetic construct
  misc_feature 1..10: note = intronic recognition element for splicing modifier (REMS)
  source 1..10: mol_type = other RNA
gggagtgtga

SEQ ID NO: 1438 - RNA, 10 nt, synthetic construct
  misc_feature 1..10: note = intronic recognition element for splicing modifier (REMS)
  source 1..10: mol_type = other RNA
tggagtgtga

SEQ ID NO: 1439-1440 - skipped (2 entries)

SEQ ID NO: 1441 - RNA, 10 nt, synthetic construct
  misc_feature 1..10: note = intronic recognition element for splicing modifier (REMS)
  source 1..10: mol_type = other RNA
atgagtgtga

SEQ ID NO: 1442 - RNA, 10 nt, synthetic construct
  misc_feature 1..10: note = intronic recognition element for splicing modifier (REMS)
  source 1..10: mol_type = other RNA
ctgagtgtga

SEQ ID NO: 1443 - RNA, 10 nt, synthetic construct
  misc_feature 1..10: note = intronic recognition element for splicing modifier (REMS)
  source 1..10: mol_type = other RNA
gtgagtgtga

SEQ ID NO: 1444 - RNA, 10 nt, synthetic construct
  misc_feature 1..10: note = intronic recognition element for splicing modifier (REMS)
  source 1..10: mol_type = other RNA
ttgagtgtga

SEQ ID NO: 1445-1446 - skipped (2 entries)

SEQ ID NO: 1447 - RNA, 10 nt, synthetic construct
  misc_feature 1..10: note = intronic recognition element for splicing modifier (REMS)
  source 1..10: mol_type = other RNA
aagagtgagc

SEQ ID NO: 1448 - RNA, 10 nt, synthetic construct
  misc_feature 1..10: note = intronic recognition element for splicing modifier (REMS)
  source 1..10: mol_type = other RNA
cagagtgagc

SEQ ID NO: 1449 - RNA, 10 nt, synthetic construct
  misc_feature 1..10: note = intronic recognition element for splicing modifier (REMS)
  source 1..10: mol_type = other RNA
gagagtgagc

SEQ ID NO: 1450 - RNA, 10 nt, synthetic construct
  misc_feature 1..10: note = intronic recognition element for splicing modifier (REMS)
  source 1..10: mol_type = other RNA
tagagtgagc

SEQ ID NO: 1451-1452 - skipped (2 entries)

SEQ ID NO: 1453 - RNA, 10 nt, synthetic construct
  misc_feature 1..10: note = intronic recognition element for splicing modifier (REMS)
  source 1..10: mol_type = other RNA
acgagtgagc

SEQ ID NO: 1454 - RNA, 10 nt, synthetic construct
  misc_feature 1..10: note = intronic recognition element for splicing modifier (REMS)
  source 1..10: mol_type = other RNA
ccgagtgagc

SEQ ID NO: 1455 - RNA, 10 nt, synthetic construct
  misc_feature 1..10: note = intronic recognition element for splicing modifier (REMS)
  source 1..10: mol_type = other RNA
gcgagtgagc

SEQ ID NO: 1456 - RNA, 10 nt, synthetic construct
  misc_feature 1..10: note = intronic recognition element for splicing modifier (REMS)
  source 1..10: mol_type = other RNA
tcgagtgagc

SEQ ID NO: 1457-1458 - skipped (2 entries)

SEQ ID NO: 1459 - RNA, 10 nt, synthetic construct
  misc_feature 1..10: note = intronic recognition element for splicing modifier (REMS)
  source 1..10: mol_type = other RNA
aggagtgagc

SEQ ID NO: 1460 - RNA, 10 nt, synthetic construct
  misc_feature 1..10: note = intronic recognition element for splicing modifier (REMS)
  source 1..10: mol_type = other RNA
cggagtgagc

SEQ ID NO: 1461 - RNA, 10 nt, synthetic construct
  misc_feature 1..10: note = intronic recognition element for splicing modifier (REMS)
  source 1..10: mol_type = other RNA
gggagtgagc

SEQ ID NO: 1462 - RNA, 10 nt, synthetic construct
  misc_feature 1..10: note = intronic recognition element for splicing modifier (REMS)
  source 1..10: mol_type = other RNA
tggagtgagc

SEQ ID NO: 1463-1464 - skipped (2 entries)

SEQ ID NO: 1465 - RNA, 10 nt, synthetic construct
  misc_feature 1..10: note = intronic recognition element for splicing modifier (REMS)
  source 1..10: mol_type = other RNA
atgagtgagc

SEQ ID NO: 1466 - RNA, 10 nt, synthetic construct
  misc_feature 1..10: note = intronic recognition element for splicing modifier (REMS)
  source 1..10: mol_type = other RNA
ctgagtgagc

SEQ ID NO: 1467 - RNA, 10 nt, synthetic construct
  misc_feature 1..10: note = intronic recognition element for splicing modifier (REMS)
  source 1..10: mol_type = other RNA
gtgagtgagc

SEQ ID NO: 1468 - RNA, 10 nt, synthetic construct
  misc_feature 1..10: note = intronic recognition element for splicing modifier (REMS)
  source 1..10: mol_type = other RNA
ttgagtgagc

SEQ ID NO: 1469-1470 - skipped (2 entries)

SEQ ID NO: 1471 - RNA, 10 nt, synthetic construct
  misc_feature 1..10: note = intronic recognition element for splicing modifier (REMS)
  source 1..10: mol_type = other RNA
aagagtgcgc

SEQ ID NO: 1472 - RNA, 10 nt, synthetic construct
  misc_feature 1..10: note = intronic recognition element for splicing modifier (REMS)
  source 1..10: mol_type = other RNA
cagagtgcgc

SEQ ID NO: 1473 - RNA, 10 nt, synthetic construct
  misc_feature 1..10: note = intronic recognition element for splicing modifier (REMS)
  source 1..10: mol_type = other RNA
gagagtgcgc

SEQ ID NO: 1474 - RNA, 10 nt, synthetic construct
  misc_feature 1..10: note = intronic recognition element for splicing modifier (REMS)
  source 1..10: mol_type = other RNA
tagagtgcgc

SEQ ID NO: 1475-1476 - skipped (2 entries)

SEQ ID NO: 1477 - RNA, 10 nt, synthetic construct
  misc_feature 1..10: note = intronic recognition element for splicing modifier (REMS)
  source 1..10: mol_type = other RNA
acgagtgcgc

SEQ ID NO: 1478 - RNA, 10 nt, synthetic construct
  misc_feature 1..10: note = intronic recognition element for splicing modifier (REMS)
  source 1..10: mol_type = other RNA
ccgagtgcgc

SEQ ID NO: 1479 - RNA, 10 nt, synthetic construct
  misc_feature 1..10: note = intronic recognition element for splicing modifier (REMS)
  source 1..10: mol_type = other RNA
gcgagtgcgc

SEQ ID NO: 1480 - RNA, 10 nt, synthetic construct
  misc_feature 1..10: note = intronic recognition element for splicing modifier (REMS)
  source 1..10: mol_type = other RNA
tcgagtgcgc

SEQ ID NO: 1481-1482 - skipped (2 entries)

SEQ ID NO: 1483 - RNA, 10 nt, synthetic construct
  misc_feature 1..10: note = intronic recognition element for splicing modifier (REMS)
  source 1..10: mol_type = other RNA
aggagtgcgc

SEQ ID NO: 1484 - RNA, 10 nt, synthetic construct
  misc_feature 1..10: note = intronic recognition element for splicing modifier (REMS)
  source 1..10: mol_type = other RNA
cggagtgcgc

SEQ ID NO: 1485 - RNA, 10 nt, synthetic construct
  misc_feature 1..10: note = intronic recognition element for splicing modifier (REMS)
  source 1..10: mol_type = other RNA
gggagtgcgc

SEQ ID NO: 1486 - RNA, 10 nt, synthetic construct
  misc_feature 1..10: note = intronic recognition element for splicing modifier (REMS)
  source 1..10: mol_type = other RNA
tggagtgcgc

SEQ ID NO: 1487-1488 - skipped (2 entries)

SEQ ID NO: 1489 - RNA, 10 nt, synthetic construct
  misc_feature 1..10: note = intronic recognition element for splicing modifier (REMS)
  source 1..10: mol_type = other RNA
atgagtgcgc

SEQ ID NO: 1490 - RNA, 10 nt, synthetic construct
  misc_feature 1..10: note = intronic recognition element for splicing modifier (REMS)
  source 1..10: mol_type = other RNA
ctgagtgcgc

SEQ ID NO: 1491 - RNA, 10 nt, synthetic construct
  misc_feature 1..10: note = intronic recognition element for splicing modifier (REMS)
  source 1..10: mol_type = other RNA
gtgagtgcgc

SEQ ID NO: 1492 - RNA, 10 nt, synthetic construct
  misc_feature 1..10: note = intronic recognition element for splicing modifier (REMS)
  source 1..10: mol_type = other RNA
ttgagtgcgc

SEQ ID NO: 1493-1494 - skipped (2 entries)

SEQ ID NO: 1495 - RNA, 10 nt, synthetic construct
  misc_feature 1..10: note = intronic recognition element for splicing modifier (REMS)
  source 1..10: mol_type = other RNA
aagagtgggc

SEQ ID NO: 1496 - RNA, 10 nt, synthetic construct
  misc_feature 1..10: note = intronic recognition element for splicing modifier (REMS)
  source 1..10: mol_type = other RNA
cagagtgggc

SEQ ID NO: 1497 - RNA, 10 nt, synthetic construct
  misc_feature 1..10: note = intronic recognition element for splicing modifier (REMS)
  source 1..10: mol_type = other RNA
gagagtgggc

SEQ ID NO: 1498 - RNA, 10 nt, synthetic construct
  misc_feature 1..10: note = intronic recognition element for splicing modifier (REMS)
  source 1..10: mol_type = other RNA
tagagtgggc

SEQ ID NO: 1499-1500 - skipped (2 entries)

SEQ ID NO: 1501 - RNA, 10 nt, synthetic construct
  misc_feature 1..10: note = intronic recognition element for splicing modifier (REMS)
  source 1..10: mol_type = other RNA
acgagtgggc

SEQ ID NO: 1502 - RNA, 10 nt, synthetic construct
  misc_feature 1..10: note = intronic recognition element for splicing modifier (REMS)
  source 1..10: mol_type = other RNA
ccgagtgggc

SEQ ID NO: 1503 - RNA, 10 nt, synthetic construct
  misc_feature 1..10: note = intronic recognition element for splicing modifier (REMS)
  source 1..10: mol_type = other RNA
gcgagtgggc

SEQ ID NO: 1504 - RNA, 10 nt, synthetic construct
  misc_feature 1..10: note = intronic recognition element for splicing modifier (REMS)
  source 1..10: mol_type = other RNA
tcgagtgggc

SEQ ID NO: 1505-1506 - skipped (2 entries)

SEQ ID NO: 1507 - RNA, 10 nt, synthetic construct
  misc_feature 1..10: note = intronic recognition element for splicing modifier (REMS)
  source 1..10: mol_type = other RNA
aggagtgggc

SEQ ID NO: 1508 - RNA, 10 nt, synthetic construct
  misc_feature 1..10: note = intronic recognition element for splicing modifier (REMS)
  source 1..10: mol_type = other RNA
cggagtgggc

SEQ ID NO: 1509 - RNA, 10 nt, synthetic construct
  misc_feature 1..10: note = intronic recognition element for splicing modifier (REMS)
  source 1..10: mol_type = other RNA
gggagtgggc

SEQ ID NO: 1510 - RNA, 10 nt, synthetic construct
  misc_feature 1..10: note = intronic recognition element for splicing modifier (REMS)
  source 1..10: mol_type = other RNA
tggagtgggc

SEQ ID NO: 1511-1512 - skipped (2 entries)

SEQ ID NO: 1513 - RNA, 10 nt, synthetic construct
  misc_feature 1..10: note = intronic recognition element for splicing modifier (REMS)
  source 1..10: mol_type = other RNA
atgagtgggc

SEQ ID NO: 1514 - RNA, 10 nt, synthetic construct
  misc_feature 1..10: note = intronic recognition element for splicing modifier (REMS)
  source 1..10: mol_type = other RNA
ctgagtgggc

SEQ ID NO: 1515 - RNA, 10 nt, synthetic construct
  misc_feature 1..10: note = intronic recognition element for splicing modifier (REMS)
  source 1..10: mol_type = other RNA
gtgagtgggc

SEQ ID NO: 1516 - RNA, 10 nt, synthetic construct
  misc_feature 1..10: note = intronic recognition element for splicing modifier (REMS)
  source 1..10: mol_type = other RNA
ttgagtgggc

SEQ ID NO: 1517-1518 - skipped (2 entries)

SEQ ID NO: 1519 - RNA, 10 nt, synthetic construct
  misc_feature 1..10: note = intronic recognition element for splicing modifier (REMS)
  source 1..10: mol_type = other RNA
aagagtgtgc

SEQ ID NO: 1520 - RNA, 10 nt, synthetic construct
  misc_feature 1..10: note = intronic recognition element for splicing modifier (REMS)
  source 1..10: mol_type = other RNA
cagagtgtgc

SEQ ID NO: 1521 - RNA, 10 nt, synthetic construct
  misc_feature 1..10: note = intronic recognition element for splicing modifier (REMS)
  source 1..10: mol_type = other RNA
gagagtgtgc

SEQ ID NO: 1522 - RNA, 10 nt, synthetic construct
  misc_feature 1..10: note = intronic recognition element for splicing modifier (REMS)
  source 1..10: mol_type = other RNA
tagagtgtgc

SEQ ID NO: 1523-1524 - skipped (2 entries)

SEQ ID NO: 1525 - RNA, 10 nt, synthetic construct
  misc_feature 1..10: note = intronic recognition element for splicing modifier (REMS)
  source 1..10: mol_type = other RNA
acgagtgtgc

SEQ ID NO: 1526 - RNA, 10 nt, synthetic construct
  misc_feature 1..10: note = intronic recognition element for splicing modifier (REMS)
  source 1..10: mol_type = other RNA
ccgagtgtgc

SEQ ID NO: 1527 - RNA, 10 nt, synthetic construct
  misc_feature 1..10: note = intronic recognition element for splicing modifier (REMS)
  source 1..10: mol_type = other RNA
gcgagtgtgc

SEQ ID NO: 1528 - RNA, 10 nt, synthetic construct
  misc_feature 1..10: note = intronic recognition element for splicing modifier (REMS)
  source 1..10: mol_type = other RNA
tcgagtgtgc

SEQ ID NO: 1529-1530 - skipped (2 entries)

SEQ ID NO: 1531 - RNA, 10 nt, synthetic construct
  misc_feature 1..10: note = intronic recognition element for splicing modifier (REMS)
  source 1..10: mol_type = other RNA
aggagtgtgc

SEQ ID NO: 1532 - RNA, 10 nt, synthetic construct
  misc_feature 1..10: note = intronic recognition element for splicing modifier (REMS)
  source 1..10: mol_type = other RNA
cggagtgtgc

SEQ ID NO: 1533 - RNA, 10 nt, synthetic construct
  misc_feature 1..10: note = intronic recognition element for splicing modifier (REMS)
  source 1..10: mol_type = other RNA
gggagtgtgc

SEQ ID NO: 1534 - RNA, 10 nt, synthetic construct
  misc_feature 1..10: note = intronic recognition element for splicing modifier (REMS)
  source 1..10: mol_type = other RNA
tggagtgtgc

SEQ ID NO: 1535-1536 - skipped (2 entries)

SEQ ID NO: 1537 - RNA, 10 nt, synthetic construct
  misc_feature 1..10: note = intronic recognition element for splicing modifier (REMS)
  source 1..10: mol_type = other RNA
atgagtgtgc

SEQ ID NO: 1538 - RNA, 10 nt, synthetic construct
  misc_feature 1..10: note = intronic recognition element for splicing modifier (REMS)
  source 1..10: mol_type = other RNA
ctgagtgtgc

SEQ ID NO: 1539 - RNA, 10 nt, synthetic construct
  misc_feature 1..10: note = intronic recognition element for splicing modifier (REMS)
  source 1..10: mol_type = other RNA
gtgagtgtgc

SEQ ID NO: 1540 - RNA, 10 nt, synthetic construct
  misc_feature 1..10: note = intronic recognition element for splicing modifier (REMS)
  source 1..10: mol_type = other RNA
ttgagtgtgc

SEQ ID NO: 1541-1542 - skipped (2 entries)

SEQ ID NO: 1543 - RNA, 10 nt, synthetic construct
  misc_feature 1..10: note = intronic recognition element for splicing modifier (REMS)
  source 1..10: mol_type = other RNA
aagagtgagg

SEQ ID NO: 1544 - RNA, 10 nt, synthetic construct
  misc_feature 1..10: note = intronic recognition element for splicing modifier (REMS)
  source 1..10: mol_type = other RNA
cagagtgagg

SEQ ID NO: 1545 - RNA, 10 nt, synthetic construct
  misc_feature 1..10: note = intronic recognition element for splicing modifier (REMS)
  source 1..10: mol_type = other RNA
gagagtgagg

SEQ ID NO: 1546 - RNA, 10 nt, synthetic construct
  misc_feature 1..10: note = intronic recognition element for splicing modifier (REMS)
  source 1..10: mol_type = other RNA
tagagtgagg

SEQ ID NO: 1547-1548 - skipped (2 entries)

SEQ ID NO: 1549 - RNA, 10 nt, synthetic construct
  misc_feature 1..10: note = intronic recognition element for splicing modifier (REMS)
  source 1..10: mol_type = other RNA
acgagtgagg

SEQ ID NO: 1550 - RNA, 10 nt, synthetic construct
  misc_feature 1..10: note = intronic recognition element for splicing modifier (REMS)
  source 1..10: mol_type = other RNA
ccgagtgagg

SEQ ID NO: 1551 - RNA, 10 nt, synthetic construct
  misc_feature 1..10: note = intronic recognition element for splicing modifier (REMS)
  source 1..10: mol_type = other RNA
gcgagtgagg

SEQ ID NO: 1552 - RNA, 10 nt, synthetic construct
  misc_feature 1..10: note = intronic recognition element for splicing modifier (REMS)
  source 1..10: mol_type = other RNA
tcgagtgagg

SEQ ID NO: 1553-1554 - skipped (2 entries)

SEQ ID NO: 1555 - RNA, 10 nt, synthetic construct
  misc_feature 1..10: note = intronic recognition element for splicing modifier (REMS)
  source 1..10: mol_type = other RNA
aggagtgagg

SEQ ID NO: 1556 - RNA, 10 nt, synthetic construct
  misc_feature 1..10: note = intronic recognition element for splicing modifier (REMS)
  source 1..10: mol_type = other RNA
cggagtgagg

SEQ ID NO: 1557 - RNA, 10 nt, synthetic construct
  misc_feature 1..10: note = intronic recognition element for splicing modifier (REMS)
  source 1..10: mol_type = other RNA
gggagtgagg

SEQ ID NO: 1558 - RNA, 10 nt, synthetic construct
  misc_feature 1..10: note = intronic recognition element for splicing modifier (REMS)
  source 1..10: mol_type = other RNA
tggagtgagg

SEQ ID NO: 1559-1560 - skipped (2 entries)

SEQ ID NO: 1561 - RNA, 10 nt, synthetic construct
  misc_feature 1..10: note = intronic recognition element for splicing modifier (REMS)
  source 1..10: mol_type = other RNA
atgagtgagg

SEQ ID NO: 1562 - RNA, 10 nt, synthetic construct
  misc_feature 1..10: note = intronic recognition element for splicing modifier (REMS)
  source 1..10: mol_type = other RNA
ctgagtgagg

SEQ ID NO: 1563 - RNA, 10 nt, synthetic construct
  misc_feature 1..10: note = intronic recognition element for splicing modifier (REMS)
  source 1..10: mol_type = other RNA
gtgagtgagg

SEQ ID NO: 1564 - RNA, 10 nt, synthetic construct
  misc_feature 1..10: note = intronic recognition element for splicing modifier (REMS)
  source 1..10: mol_type = other RNA
ttgagtgagg

SEQ ID NO: 1565-1566 - skipped (2 entries)

SEQ ID NO: 1567 - RNA, 10 nt, synthetic construct
  misc_feature 1..10: note = intronic recognition element for splicing modifier (REMS)
  source 1..10: mol_type = other RNA
aagagtgcgg

SEQ ID NO: 1568 - RNA, 10 nt, synthetic construct
  misc_feature 1..10: note = intronic recognition element for splicing modifier (REMS)
  source 1..10: mol_type = other RNA
cagagtgcgg

SEQ ID NO: 1569 - RNA, 10 nt, synthetic construct
  misc_feature 1..10: note = intronic recognition element for splicing modifier (REMS)
  source 1..10: mol_type = other RNA
gagagtgcgg

SEQ ID NO: 1570 - RNA, 10 nt, synthetic construct
  misc_feature 1..10: note = intronic recognition element for splicing modifier (REMS)
  source 1..10: mol_type = other RNA
tagagtgcgg

SEQ ID NO: 1571-1572 - skipped (2 entries)

SEQ ID NO: 1573 - RNA, 10 nt, synthetic construct
  misc_feature 1..10: note = intronic recognition element for splicing modifier (REMS)
  source 1..10: mol_type = other RNA
acgagtgcgg

SEQ ID NO: 1574 - RNA, 10 nt, synthetic construct
  misc_feature 1..10: note = intronic recognition element for splicing modifier (REMS)
  source 1..10: mol_type = other RNA
ccgagtgcgg

SEQ ID NO: 1575 - RNA, 10 nt, synthetic construct
  misc_feature 1..10: note = intronic recognition element for splicing modifier (REMS)
  source 1..10: mol_type = other RNA
gcgagtgcgg

SEQ ID NO: 1576 - RNA, 10 nt, synthetic construct
  misc_feature 1..10: note = intronic recognition element for splicing modifier (REMS)
  source 1..10: mol_type = other RNA
tcgagtgcgg

SEQ ID NO: 1577-1578 - skipped (2 entries)

SEQ ID NO: 1579 - RNA, 10 nt, synthetic construct
  misc_feature 1..10: note = intronic recognition element for splicing modifier (REMS)
  source 1..10: mol_type = other RNA
aggagtgcgg

SEQ ID NO: 1580 - RNA, 10 nt, synthetic construct
  misc_feature 1..10: note = intronic recognition element for splicing modifier (REMS)
  source 1..10: mol_type = other RNA
cggagtgcgg

SEQ ID NO: 1581 - RNA, 10 nt, synthetic construct
  misc_feature 1..10: note = intronic recognition element for splicing modifier (REMS)
  source 1..10: mol_type = other RNA
gggagtgcgg

SEQ ID NO: 1582 - RNA, 10 nt, synthetic construct
  misc_feature 1..10: note = intronic recognition element for splicing modifier (REMS)
  source 1..10: mol_type = other RNA
tggagtgcgg

SEQ ID NO: 1583-1584 - skipped (2 entries)

SEQ ID NO: 1585 - RNA, 10 nt, synthetic construct
  misc_feature 1..10: note = intronic recognition element for splicing modifier (REMS)
  source 1..10: mol_type = other RNA
atgagtgcgg

SEQ ID NO: 1586 - RNA, 10 nt, synthetic construct
  misc_feature 1..10: note = intronic recognition element for splicing modifier (REMS)
  source 1..10: mol_type = other RNA
ctgagtgcgg

SEQ ID NO: 1587 - RNA, 10 nt, synthetic construct
  misc_feature 1..10: note = intronic recognition element for splicing modifier (REMS)
  source 1..10: mol_type = other RNA
gtgagtgcgg

SEQ ID NO: 1588 - RNA, 10 nt, synthetic construct
  misc_feature 1..10: note = intronic recognition element for splicing modifier (REMS)
  source 1..10: mol_type = other RNA
ttgagtgcgg

SEQ ID NO: 1589-1590 - skipped (2 entries)

SEQ ID NO: 1591 - RNA, 10 nt, synthetic construct
  misc_feature 1..10: note = intronic recognition element for splicing modifier (REMS)
  source 1..10: mol_type = other RNA
aagagtgggg

SEQ ID NO: 1592 - RNA, 10 nt, synthetic construct
  misc_feature 1..10: note = intronic recognition element for splicing modifier (REMS)
  source 1..10: mol_type = other RNA
cagagtgggg

SEQ ID NO: 1593 - RNA, 10 nt, synthetic construct
  misc_feature 1..10: note = intronic recognition element for splicing modifier (REMS)
  source 1..10: mol_type = other RNA
gagagtgggg

SEQ ID NO: 1594 - RNA, 10 nt, synthetic construct
  misc_feature 1..10: note = intronic recognition element for splicing modifier (REMS)
  source 1..10: mol_type = other RNA
tagagtgggg

SEQ ID NO: 1595-1596 - skipped (2 entries)

SEQ ID NO: 1597 - RNA, 10 nt, synthetic construct
  misc_feature 1..10: note = intronic recognition element for splicing modifier (REMS)
  source 1..10: mol_type = other RNA
acgagtgggg

SEQ ID NO: 1598 - RNA, 10 nt, synthetic construct
  misc_feature 1..10: note = intronic recognition element for splicing modifier (REMS)
  source 1..10: mol_type = other RNA
ccgagtgggg

SEQ ID NO: 1599 - RNA, 10 nt, synthetic construct
  misc_feature 1..10: note = intronic recognition element for splicing modifier (REMS)
  source 1..10: mol_type = other RNA
gcgagtgggg

SEQ ID NO: 1600 - RNA, 10 nt, synthetic construct
  misc_feature 1..10: note = intronic recognition element for splicing modifier (REMS)
  source 1..10: mol_type = other RNA
tcgagtgggg

SEQ ID NO: 1601-1602 - skipped (2 entries)

SEQ ID NO: 1603 - RNA, 10 nt, synthetic construct
  misc_feature 1..10: note = intronic recognition element for splicing modifier (REMS)
  source 1..10: mol_type = other RNA
aggagtgggg

SEQ ID NO: 1604 - RNA, 10 nt, synthetic construct
  misc_feature 1..10: note = intronic recognition element for splicing modifier (REMS)
  source 1..10: mol_type = other RNA
cggagtgggg

SEQ ID NO: 1605 - RNA, 10 nt, synthetic construct
  misc_feature 1..10: note = intronic recognition element for splicing modifier (REMS)
  source 1..10: mol_type = other RNA
gggagtgggg

SEQ ID NO: 1606 - RNA, 10 nt, synthetic construct
  misc_feature 1..10: note = intronic recognition element for splicing modifier (REMS)
  source 1..10: mol_type = other RNA
tggagtgggg

SEQ ID NO: 1607-1608 - skipped (2 entries)

SEQ ID NO: 1609 - RNA, 10 nt, synthetic construct
  misc_feature 1..10: note = intronic recognition element for splicing modifier (REMS)
  source 1..10: mol_type = other RNA
atgagtgggg

SEQ ID NO: 1610 - RNA, 10 nt, synthetic construct
  misc_feature 1..10: note = intronic recognition element for splicing modifier (REMS)
  source 1..10: mol_type = other RNA
ctgagtgggg

SEQ ID NO: 1611 - RNA, 10 nt, synthetic construct
  misc_feature 1..10: note = intronic recognition element for splicing modifier (REMS)
  source 1..10: mol_type = other RNA
gtgagtgggg

SEQ ID NO: 1612 - RNA, 10 nt, synthetic construct
  misc_feature 1..10: note = intronic recognition element for splicing modifier (REMS)
  source 1..10: mol_type = other RNA
ttgagtgggg

SEQ ID NO: 1613-1614 - skipped (2 entries)

SEQ ID NO: 1615 - RNA, 10 nt, synthetic construct
  misc_feature 1..10: note = intronic recognition element for splicing modifier (REMS)
  source 1..10: mol_type = other RNA
aagagtgtgg

SEQ ID NO: 1616 - RNA, 10 nt, synthetic construct
  misc_feature 1..10: note = intronic recognition element for splicing modifier (REMS)
  source 1..10: mol_type = other RNA
cagagtgtgg

SEQ ID NO: 1617 - RNA, 10 nt, synthetic construct
  misc_feature 1..10: note = intronic recognition element for splicing modifier (REMS)
  source 1..10: mol_type = other RNA
gagagtgtgg

SEQ ID NO: 1618 - RNA, 10 nt, synthetic construct
  misc_feature 1..10: note = intronic recognition element for splicing modifier (REMS)
  source 1..10: mol_type = other RNA
tagagtgtgg

SEQ ID NO: 1619-1620 - skipped (2 entries)

SEQ ID NO: 1621 - RNA, 10 nt, synthetic construct
  misc_feature 1..10: note = intronic recognition element for splicing modifier (REMS)
  source 1..10: mol_type = other RNA
acgagtgtgg

SEQ ID NO: 1622 - RNA, 10 nt, synthetic construct
  misc_feature 1..10: note = intronic recognition element for splicing modifier (REMS)
  source 1..10: mol_type = other RNA
ccgagtgtgg

SEQ ID NO: 1623 - RNA, 10 nt, synthetic construct
  misc_feature 1..10: note = intronic recognition element for splicing modifier (REMS)
  source 1..10: mol_type = other RNA
gcgagtgtgg

SEQ ID NO: 1624 - RNA, 10 nt, synthetic construct
  misc_feature 1..10: note = intronic recognition element for splicing modifier (REMS)
  source 1..10: mol_type = other RNA
tcgagtgtgg

SEQ ID NO: 1625-1626 - skipped (2 entries)

SEQ ID NO: 1627 - RNA, 10 nt, synthetic construct
  misc_feature 1..10: note = intronic recognition element for splicing modifier (REMS)
  source 1..10: mol_type = other RNA
aggagtgtgg

SEQ ID NO: 1628 - RNA, 10 nt, synthetic construct
  misc_feature 1..10: note = intronic recognition element for splicing modifier (REMS)
  source 1..10: mol_type = other RNA
cggagtgtgg

SEQ ID NO: 1629 - RNA, 10 nt, synthetic construct
  misc_feature 1..10: note = intronic recognition element for splicing modifier (REMS)
  source 1..10: mol_type = other RNA
gggagtgtgg

SEQ ID NO: 1630 - RNA, 10 nt, synthetic construct
  misc_feature 1..10: note = intronic recognition element for splicing modifier (REMS)
  source 1..10: mol_type = other RNA
tggagtgtgg

SEQ ID NO: 1631-1632 - skipped (2 entries)

SEQ ID NO: 1633 - RNA, 10 nt, synthetic construct
  misc_feature 1..10: note = intronic recognition element for splicing modifier (REMS)
  source 1..10: mol_type = other RNA
atgagtgtgg

SEQ ID NO: 1634 - RNA, 10 nt, synthetic construct
  misc_feature 1..10: note = intronic recognition element for splicing modifier (REMS)
  source 1..10: mol_type = other RNA
ctgagtgtgg

SEQ ID NO: 1635 - RNA, 10 nt, synthetic construct
  misc_feature 1..10: note = intronic recognition element for splicing modifier (REMS)
  source 1..10: mol_type = other RNA
gtgagtgtgg

SEQ ID NO: 1636 - RNA, 10 nt, synthetic construct
  misc_feature 1..10: note = intronic recognition element for splicing modifier (REMS)
  source 1..10: mol_type = other RNA
ttgagtgtgg

SEQ ID NO: 1637-1638 - skipped (2 entries)

SEQ ID NO: 1639 - RNA, 10 nt, synthetic construct
  misc_feature 1..10: note = intronic recognition element for splicing modifier (REMS)
  source 1..10: mol_type = other RNA
aagagtgagt

SEQ ID NO: 1640 - RNA, 10 nt, synthetic construct
  misc_feature 1..10: note = intronic recognition element for splicing modifier (REMS)
  source 1..10: mol_type = other RNA
cagagtgagt

SEQ ID NO: 1641 - RNA, 10 nt, synthetic construct
  misc_feature 1..10: note = intronic recognition element for splicing modifier (REMS)
  source 1..10: mol_type = other RNA
gagagtgagt

SEQ ID NO: 1642 - RNA, 10 nt, synthetic construct
  misc_feature 1..10: note = intronic recognition element for splicing modifier (REMS)
  source 1..10: mol_type = other RNA
tagagtgagt

SEQ ID NO: 1643-1644 - skipped (2 entries)

SEQ ID NO: 1645 - RNA, 10 nt, synthetic construct
  misc_feature 1..10: note = intronic recognition element for splicing modifier (REMS)
  source 1..10: mol_type = other RNA
acgagtgagt

SEQ ID NO: 1646 - RNA, 10 nt, synthetic construct
  misc_feature 1..10: note = intronic recognition element for splicing modifier (REMS)
  source 1..10: mol_type = other RNA
ccgagtgagt

SEQ ID NO: 1647 - RNA, 10 nt, synthetic construct
  misc_feature 1..10: note = intronic recognition element for splicing modifier (REMS)
  source 1..10: mol_type = other RNA
gcgagtgagt

SEQ ID NO: 1648 - RNA, 10 nt, synthetic construct
  misc_feature 1..10: note = intronic recognition element for splicing modifier (REMS)
  source 1..10: mol_type = other RNA
tcgagtgagt

SEQ ID NO: 1649-1650 - skipped (2 entries)

SEQ ID NO: 1651 - RNA, 10 nt, synthetic construct
  misc_feature 1..10: note = intronic recognition element for splicing modifier (REMS)
  source 1..10: mol_type = other RNA
aggagtgagt

SEQ ID NO: 1652 - RNA, 10 nt, synthetic construct
  misc_feature 1..10: note = intronic recognition element for splicing modifier (REMS)
  source 1..10: mol_type = other RNA
cggagtgagt

SEQ ID NO: 1653 - RNA, 10 nt, synthetic construct
  misc_feature 1..10: note = intronic recognition element for splicing modifier (REMS)
  source 1..10: mol_type = other RNA
gggagtgagt

SEQ ID NO: 1654 - RNA, 10 nt, synthetic construct
  misc_feature 1..10: note = intronic recognition element for splicing modifier (REMS)
  source 1..10: mol_type = other RNA
tggagtgagt

SEQ ID NO: 1655-1656 - skipped (2 entries)

SEQ ID NO: 1657 - RNA, 10 nt, synthetic construct
  misc_feature 1..10: note = intronic recognition element for splicing modifier (REMS)
  source 1..10: mol_type = other RNA
atgagtgagt

SEQ ID NO: 1658 - RNA, 10 nt, synthetic construct
  misc_feature 1..10: note = intronic recognition element for splicing modifier (REMS)
  source 1..10: mol_type = other RNA
ctgagtgagt

SEQ ID NO: 1659 - RNA, 10 nt, synthetic construct
  misc_feature 1..10: note = intronic recognition element for splicing modifier (REMS)
  source 1..10: mol_type = other RNA
gtgagtgagt

SEQ ID NO: 1660 - RNA, 10 nt, synthetic construct
  misc_feature 1..10: note = intronic recognition element for splicing modifier (REMS)
  source 1..10: mol_type = other RNA
ttgagtgagt

SEQ ID NO: 1661-1662 - skipped (2 entries)

SEQ ID NO: 1663 - RNA, 10 nt, synthetic construct
  misc_feature 1..10: note = intronic recognition element for splicing modifier (REMS)
  source 1..10: mol_type = other RNA
aagagtgcgt

SEQ ID NO: 1664 - RNA, 10 nt, synthetic construct
  misc_feature 1..10: note = intronic recognition element for splicing modifier (REMS)
  source 1..10: mol_type = other RNA
cagagtgcgt

SEQ ID NO: 1665 - RNA, 10 nt, synthetic construct
  misc_feature 1..10: note = intronic recognition element for splicing modifier (REMS)
  source 1..10: mol_type = other RNA
gagagtgcgt

SEQ ID NO: 1666 - RNA, 10 nt, synthetic construct
  misc_feature 1..10: note = intronic recognition element for splicing modifier (REMS)
  source 1..10: mol_type = other RNA
tagagtgcgt

SEQ ID NO: 1667-1668 - skipped (2 entries)

SEQ ID NO: 1669 - RNA, 10 nt, synthetic construct
  misc_feature 1..10: note = intronic recognition element for splicing modifier (REMS)
  source 1..10: mol_type = other RNA
acgagtgcgt

SEQ ID NO: 1670 - RNA, 10 nt, synthetic construct
  misc_feature 1..10: note = intronic recognition element for splicing modifier (REMS)
  source 1..10: mol_type = other RNA
ccgagtgcgt

SEQ ID NO: 1671 - RNA, 10 nt, synthetic construct
  misc_feature 1..10: note = intronic recognition element for splicing modifier (REMS)
  source 1..10: mol_type = other RNA
gcgagtgcgt

SEQ ID NO: 1672 - RNA, 10 nt, synthetic construct
  misc_feature 1..10: note = intronic recognition element for splicing modifier (REMS)
  source 1..10: mol_type = other RNA
tcgagtgcgt

SEQ ID NO: 1673-1674 - skipped (2 entries)

SEQ ID NO: 1675 - RNA, 10 nt, synthetic construct
  misc_feature 1..10: note = intronic recognition element for splicing modifier (REMS)
  source 1..10: mol_type = other RNA
aggagtgcgt

SEQ ID NO: 1676 - RNA, 10 nt, synthetic construct
  misc_feature 1..10: note = intronic recognition element for splicing modifier (REMS)
  source 1..10: mol_type = other RNA
cggagtgcgt

SEQ ID NO: 1677 - RNA, 10 nt, synthetic construct
  misc_feature 1..10: note = intronic recognition element for splicing modifier (REMS)
  source 1..10: mol_type = other RNA
gggagtgcgt

SEQ ID NO: 1678 - RNA, 10 nt, synthetic construct
  misc_feature 1..10: note = intronic recognition element for splicing modifier (REMS)
  source 1..10: mol_type = other RNA
tggagtgcgt

SEQ ID NO: 1679-1680 - skipped (2 entries)

SEQ ID NO: 1681 - RNA, 10 nt, synthetic construct
  misc_feature 1..10: note = intronic recognition element for splicing modifier (REMS)
  source 1..10: mol_type = other RNA
atgagtgcgt

SEQ ID NO: 1682 - RNA, 10 nt, synthetic construct
  misc_feature 1..10: note = intronic recognition element for splicing modifier (REMS)
  source 1..10: mol_type = other RNA
ctgagtgcgt

SEQ ID NO: 1683 - RNA, 10 nt, synthetic construct
  misc_feature 1..10: note = intronic recognition element for splicing modifier (REMS)
  source 1..10: mol_type = other RNA
gtgagtgcgt

SEQ ID NO: 1684 - RNA, 10 nt, synthetic construct
  misc_feature 1..10: note = intronic recognition element for splicing modifier (REMS)
  source 1..10: mol_type = other RNA
ttgagtgcgt

SEQ ID NO: 1685-1686 - skipped (2 entries)

SEQ ID NO: 1687 - RNA, 10 nt, synthetic construct
  misc_feature 1..10: note = intronic recognition element for splicing modifier (REMS)
  source 1..10: mol_type = other RNA
aagagtgggt

SEQ ID NO: 1688 - RNA, 10 nt, synthetic construct
  misc_feature 1..10: note = intronic recognition element for splicing modifier (REMS)
  source 1..10: mol_type = other RNA
cagagtgggt

SEQ ID NO: 1689 - RNA, 10 nt, synthetic construct
  misc_feature 1..10: note = intronic recognition element for splicing modifier (REMS)
  source 1..10: mol_type = other RNA
gagagtgggt

SEQ ID NO: 1690 - RNA, 10 nt, synthetic construct
  misc_feature 1..10: note = intronic recognition element for splicing modifier (REMS)
  source 1..10: mol_type = other RNA
tagagtgggt

SEQ ID NO: 1691-1692 - skipped (2 entries)

SEQ ID NO: 1693 - RNA, 10 nt, synthetic construct
  misc_feature 1..10: note = intronic recognition element for splicing modifier (REMS)
  source 1..10: mol_type = other RNA
acgagtgggt

SEQ ID NO: 1694 - RNA, 10 nt, synthetic construct
  misc_feature 1..10: note = intronic recognition element for splicing modifier (REMS)
  source 1..10: mol_type = other RNA
ccgagtgggt

SEQ ID NO: 1695 - RNA, 10 nt, synthetic construct
  misc_feature 1..10: note = intronic recognition element for splicing modifier (REMS)
  source 1..10: mol_type = other RNA
gcgagtgggt

SEQ ID NO: 1696 - RNA, 10 nt, synthetic construct
  misc_feature 1..10: note = intronic recognition element for splicing modifier (REMS)
  source 1..10: mol_type = other RNA
tcgagtgggt

SEQ ID NO: 1697-1698 - skipped (2 entries)

SEQ ID NO: 1699 - RNA, 10 nt, synthetic construct
  misc_feature 1..10: note = intronic recognition element for splicing modifier (REMS)
  source 1..10: mol_type = other RNA
aggagtgggt

SEQ ID NO: 1700 - RNA, 10 nt, synthetic construct
  misc_feature 1..10: note = intronic recognition element for splicing modifier (REMS)
  source 1..10: mol_type = other RNA
cggagtgggt

SEQ ID NO: 1701 - RNA, 10 nt, synthetic construct
  misc_feature 1..10: note = intronic recognition element for splicing modifier (REMS)
  source 1..10: mol_type = other RNA
gggagtgggt

SEQ ID NO: 1702 - RNA, 10 nt, synthetic construct
  misc_feature 1..10: note = intronic recognition element for splicing modifier (REMS)
  source 1..10: mol_type = other RNA
tggagtgggt

SEQ ID NO: 1703-1704 - skipped (2 entries)

SEQ ID NO: 1705 - RNA, 10 nt, synthetic construct
  misc_feature 1..10: note = intronic recognition element for splicing modifier (REMS)
  source 1..10: mol_type = other RNA
atgagtgggt

SEQ ID NO: 1706 - RNA, 10 nt, synthetic construct
  misc_feature 1..10: note = intronic recognition element for splicing modifier (REMS)
  source 1..10: mol_type = other RNA
ctgagtgggt

SEQ ID NO: 1707 - RNA, 10 nt, synthetic construct
  misc_feature 1..10: note = intronic recognition element for splicing modifier (REMS)
  source 1..10: mol_type = other RNA
gtgagtgggt

SEQ ID NO: 1708 - RNA, 10 nt, synthetic construct
  misc_feature 1..10: note = intronic recognition element for splicing modifier (REMS)
  source 1..10: mol_type = other RNA
ttgagtgggt

SEQ ID NO: 1709-1710 - skipped (2 entries)

SEQ ID NO: 1711 - RNA, 10 nt, synthetic construct
  misc_feature 1..10: note = intronic recognition element for splicing modifier (REMS)
  source 1..10: mol_type = other RNA
aagagtgtgt

SEQ ID NO: 1712 - RNA, 10 nt, synthetic construct
  misc_feature 1..10: note = intronic recognition element for splicing modifier (REMS)
  source 1..10: mol_type = other RNA
cagagtgtgt

SEQ ID NO: 1713 - RNA, 10 nt, synthetic construct
  misc_feature 1..10: note = intronic recognition element for splicing modifier (REMS)
  source 1..10: mol_type = other RNA
gagagtgtgt

SEQ ID NO: 1714 - RNA, 10 nt, synthetic construct
  misc_feature 1..10: note = intronic recognition element for splicing modifier (REMS)
  source 1..10: mol_type = other RNA
tagagtgtgt

SEQ ID NO: 1715-1716 - skipped (2 entries)

SEQ ID NO: 1717 - RNA, 10 nt, synthetic construct
  misc_feature 1..10: note = intronic recognition element for splicing modifier (REMS)
  source 1..10: mol_type = other RNA
acgagtgtgt

SEQ ID NO: 1718 - RNA, 10 nt, synthetic construct
  misc_feature 1..10: note = intronic recognition element for splicing modifier (REMS)
  source 1..10: mol_type = other RNA
ccgagtgtgt

SEQ ID NO: 1719 - RNA, 10 nt, synthetic construct
  misc_feature 1..10: note = intronic recognition element for splicing modifier (REMS)
  source 1..10: mol_type = other RNA
gcgagtgtgt

SEQ ID NO: 1720 - RNA, 10 nt, synthetic construct
  misc_feature 1..10: note = intronic recognition element for splicing modifier (REMS)
  source 1..10: mol_type = other RNA
tcgagtgtgt

SEQ ID NO: 1721-1722 - skipped (2 entries)

SEQ ID NO: 1723 - RNA, 10 nt, synthetic construct
  misc_feature 1..10: note = intronic recognition element for splicing modifier (REMS)
  source 1..10: mol_type = other RNA
aggagtgtgt

SEQ ID NO: 1724 - RNA, 10 nt, synthetic construct
  misc_feature 1..10: note = intronic recognition element for splicing modifier (REMS)
  source 1..10: mol_type = other RNA
cggagtgtgt

SEQ ID NO: 1725 - RNA, 10 nt, synthetic construct
  misc_feature 1..10: note = intronic recognition element for splicing modifier (REMS)
  source 1..10: mol_type = other RNA
gggagtgtgt

SEQ ID NO: 1726 - RNA, 10 nt, synthetic construct
  misc_feature 1..10: note = intronic recognition element for splicing modifier (REMS)
  source 1..10: mol_type = other RNA
tggagtgtgt

SEQ ID NO: 1727-1728 - skipped (2 entries)

SEQ ID NO: 1729 - RNA, 10 nt, synthetic construct
  misc_feature 1..10: note = intronic recognition element for splicing modifier (REMS)
  source 1..10: mol_type = other RNA
atgagtgtgt

SEQ ID NO: 1730 - RNA, 10 nt, synthetic construct
  misc_feature 1..10: note = intronic recognition element for splicing modifier (REMS)
  source 1..10: mol_type = other RNA
ctgagtgtgt

SEQ ID NO: 1731 - RNA, 10 nt, synthetic construct
  misc_feature 1..10: note = intronic recognition element for splicing modifier (REMS)
  source 1..10: mol_type = other RNA
gtgagtgtgt

SEQ ID NO: 1732 - RNA, 10 nt, synthetic construct
  misc_feature 1..10: note = intronic recognition element for splicing modifier (REMS)
  source 1..10: mol_type = other RNA
ttgagtgtgt

SEQ ID NO: 1733-1950 - skipped (218 entries)

SEQ ID NO: 1951 - DNA, 10 bp, synthetic construct
  misc_feature 1..10: note = intronic recognition element for splicing modifier (REMS)
  source 1..10: mol_type = other DNA
aagagtraga

SEQ ID NO: 1952 - DNA, 10 bp, synthetic construct
  misc_feature 1..10: note = intronic recognition element for splicing modifier (REMS)
  source 1..10: mol_type = other DNA
cagagtraga

SEQ ID NO: 1953 - DNA, 10 bp, synthetic construct
  misc_feature 1..10: note = intronic recognition element for splicing modifier (REMS)
  source 1..10: mol_type = other DNA
gagagtraga

SEQ ID NO: 1954 - DNA, 10 bp, synthetic construct
  misc_feature 1..10: note = intronic recognition element for splicing modifier (REMS)
  source 1..10: mol_type = other DNA
tagagtraga

SEQ ID NO: 1955-1956 - skipped (2 entries)

SEQ ID NO: 1957 - DNA, 10 bp, synthetic construct
  misc_feature 1..10: note = intronic recognition element for splicing modifier (REMS)
  source 1..10: mol_type = other DNA
acgagtraga

SEQ ID NO: 1958 - DNA, 10 bp, synthetic construct
  misc_feature 1..10: note = intronic recognition element for splicing modifier (REMS)
  source 1..10: mol_type = other DNA
ccgagtraga

SEQ ID NO: 1959 - DNA, 10 bp, synthetic construct
  misc_feature 1..10: note = intronic recognition element for splicing modifier (REMS)
  source 1..10: mol_type = other DNA
gcgagtraga

SEQ ID NO: 1960 - DNA, 10 bp, synthetic construct
  misc_feature 1..10: note = intronic recognition element for splicing modifier (REMS)
  source 1..10: mol_type = other DNA
tcgagtraga

SEQ ID NO: 1961-1962 - skipped (2 entries)

SEQ ID NO: 1963 - DNA, 10 bp, synthetic construct
  misc_feature 1..10: note = intronic recognition element for splicing modifier (REMS)
  source 1..10: mol_type = other DNA
aggagtraga

SEQ ID NO: 1964 - DNA, 10 bp, synthetic construct
  misc_feature 1..10: note = intronic recognition element for splicing modifier (REMS)
  source 1..10: mol_type = other DNA
cggagtraga

SEQ ID NO: 1965 - DNA, 10 bp, synthetic construct
  misc_feature 1..10: note = intronic recognition element for splicing modifier (REMS)
  source 1..10: mol_type = other DNA
gggagtraga

SEQ ID NO: 1966 - DNA, 10 bp, synthetic construct
  misc_feature 1..10: note = intronic recognition element for splicing modifier (REMS)
  source 1..10: mol_type = other DNA
tggagtraga

SEQ ID NO: 1967-1968 - skipped (2 entries)

SEQ ID NO: 1969 - DNA, 10 bp, synthetic construct
  misc_feature 1..10: note = intronic recognition element for splicing modifier (REMS)
  source 1..10: mol_type = other DNA
atgagtraga

SEQ ID NO: 1970 - DNA, 10 bp, synthetic construct
  misc_feature 1..10: note = intronic recognition element for splicing modifier (REMS)
  source 1..10: mol_type = other DNA
ctgagtraga

SEQ ID NO: 1971 - DNA, 10 bp, synthetic construct
  misc_feature 1..10: note = intronic recognition element for splicing modifier (REMS)
  source 1..10: mol_type = other DNA
gtgagtraga

SEQ ID NO: 1972 - DNA, 10 bp, synthetic construct
  misc_feature 1..10: note = intronic recognition element for splicing modifier (REMS)
  source 1..10: mol_type = other DNA
ttgagtraga

SEQ ID NO: 1973-1974 - skipped (2 entries)

SEQ ID NO: 1975 - DNA, 10 bp, synthetic construct
  misc_feature 1..10: note = intronic recognition element for splicing modifier (REMS)
  source 1..10: mol_type = other DNA
aagagtrcga

SEQ ID NO: 1976 - DNA, 10 bp, synthetic construct
  misc_feature 1..10: note = intronic recognition element for splicing modifier (REMS)
  source 1..10: mol_type = other DNA
cagagtrcga

SEQ ID NO: 1977 - DNA, 10 bp, synthetic construct
  misc_feature 1..10: note = intronic recognition element for splicing modifier (REMS)
  source 1..10: mol_type = other DNA
gagagtrcga

SEQ ID NO: 1978 - DNA, 10 bp, synthetic construct
  misc_feature 1..10: note = intronic recognition element for splicing modifier (REMS)
  source 1..10: mol_type = other DNA
tagagtrcga

SEQ ID NO: 1979-1980 - skipped (2 entries)

SEQ ID NO: 1981 - DNA, 10 bp, synthetic construct
  misc_feature 1..10: note = intronic recognition element for splicing modifier (REMS)
  source 1..10: mol_type = other DNA
acgagtrcga

SEQ ID NO: 1982 - DNA, 10 bp, synthetic construct
  misc_feature 1..10: note = intronic recognition element for splicing modifier (REMS)
  source 1..10: mol_type = other DNA
ccgagtrcga

SEQ ID NO: 1983 - DNA, 10 bp, synthetic construct
  misc_feature 1..10: note = intronic recognition element for splicing modifier (REMS)
  source 1..10: mol_type = other DNA
gcgagtrcga

SEQ ID NO: 1984 - DNA, 10 bp, synthetic construct
  misc_feature 1..10: note = intronic recognition element for splicing modifier (REMS)
  source 1..10: mol_type = other DNA
tcgagtrcga

SEQ ID NO: 1985-1986 - skipped (2 entries)

SEQ ID NO: 1987 - DNA, 10 bp, synthetic construct
  misc_feature 1..10: note = intronic recognition element for splicing modifier (REMS)
  source 1..10: mol_type = other DNA
aggagtrcga

SEQ ID NO: 1988 - DNA, 10 bp, synthetic construct
  misc_feature 1..10: note = intronic recognition element for splicing modifier (REMS)
  source 1..10: mol_type = other DNA
cggagtrcga

SEQ ID NO: 1989 - DNA, 10 bp, synthetic construct
  misc_feature 1..10: note = intronic recognition element for splicing modifier (REMS)
  source 1..10: mol_type = other DNA
gggagtrcga

SEQ ID NO: 1990 - DNA, 10 bp, synthetic construct
  misc_feature 1..10: note = intronic recognition element for splicing modifier (REMS)
  source 1..10: mol_type = other DNA
tggagtrcga

SEQ ID NO: 1991-1992 - skipped (2 entries)

SEQ ID NO: 1993 - DNA, 10 bp, synthetic construct
  misc_feature 1..10: note = intronic recognition element for splicing modifier (REMS)
  source 1..10: mol_type = other DNA
atgagtrcga

SEQ ID NO: 1994 - DNA, 10 bp, synthetic construct
  misc_feature 1..10: note = intronic recognition element for splicing modifier (REMS)
  source 1..10: mol_type = other DNA
ctgagtrcga

SEQ ID NO: 1995 - DNA, 10 bp, synthetic construct
  misc_feature 1..10: note = intronic recognition element for splicing modifier (REMS)
  source 1..10: mol_type = other DNA
gtgagtrcga

SEQ ID NO: 1996 - DNA, 10 bp, synthetic construct
  misc_feature 1..10: note = intronic recognition element for splicing modifier (REMS)
  source 1..10: mol_type = other DNA
ttgagtrcga

SEQ ID NO: 1997-1998 - skipped (2 entries)

SEQ ID NO: 1999 - DNA, 10 bp, synthetic construct
  misc_feature 1..10: note = intronic recognition element for splicing modifier (REMS)
  source 1..10: mol_type = other DNA
aagagtrgga

SEQ ID NO: 2000 - DNA, 10 bp, synthetic construct
  misc_feature 1..10: note = intronic recognition element for splicing modifier (REMS)
  source 1..10: mol_type = other DNA
cagagtrgga

SEQ ID NO: 2001 - DNA, 10 bp, synthetic construct
  misc_feature 1..10: note = intronic recognition element for splicing modifier (REMS)
  source 1..10: mol_type = other DNA
gagagtrgga

SEQ ID NO: 2002 - DNA, 10 bp, synthetic construct
  misc_feature 1..10: note = intronic recognition element for splicing modifier (REMS)
  source 1..10: mol_type = other DNA
tagagtrgga

SEQ ID NO: 2003-2004 - skipped (2 entries)

SEQ ID NO: 2005 - DNA, 10 bp, synthetic construct
  misc_feature 1..10: note = intronic recognition element for splicing modifier (REMS)
  source 1..10: mol_type = other DNA
acgagtrgga

SEQ ID NO: 2006 - DNA, 10 bp, synthetic construct
  misc_feature 1..10: note = intronic recognition element for splicing modifier (REMS)
  source 1..10: mol_type = other DNA
ccgagtrgga

SEQ ID NO: 2007 - DNA, 10 bp, synthetic construct
  misc_feature 1..10: note = intronic recognition element for splicing modifier (REMS)
  source 1..10: mol_type = other DNA
gcgagtrgga

SEQ ID NO: 2008 - DNA, 10 bp, synthetic construct
  misc_feature 1..10: note = intronic recognition element for splicing modifier (REMS)
  source 1..10: mol_type = other DNA
tcgagtrgga

SEQ ID NO: 2009-2010 - skipped (2 entries)

SEQ ID NO: 2011 - DNA, 10 bp, synthetic construct
  misc_feature 1..10: note = intronic recognition element for splicing modifier (REMS)
  source 1..10: mol_type = other DNA
aggagtrgga

SEQ ID NO: 2012 - DNA, 10 bp, synthetic construct
  misc_feature 1..10: note = intronic recognition element for splicing modifier (REMS)
  source 1..10: mol_type = other DNA
cggagtrgga

SEQ ID NO: 2013 - DNA, 10 bp, synthetic construct
  misc_feature 1..10: note = intronic recognition element for splicing modifier (REMS)
  source 1..10: mol_type = other DNA
gggagtrgga

SEQ ID NO: 2014 - DNA, 10 bp, synthetic construct
  misc_feature 1..10: note = intronic recognition element for splicing modifier (REMS)
  source 1..10: mol_type = other DNA
tggagtrgga

SEQ ID NO: 2015-2016 - skipped (2 entries)

SEQ ID NO: 2017 - DNA, 10 bp, synthetic construct
  misc_feature 1..10: note = intronic recognition element for splicing modifier (REMS)
  source 1..10: mol_type = other DNA
atgagtrgga

SEQ ID NO: 2018 - DNA, 10 bp, synthetic construct
  misc_feature 1..10: note = intronic recognition element for splicing modifier (REMS)
  source 1..10: mol_type = other DNA
ctgagtrgga

SEQ ID NO: 2019 - DNA, 10 bp, synthetic construct
  misc_feature 1..10: note = intronic recognition element for splicing modifier (REMS)
  source 1..10: mol_type = other DNA
gtgagtrgga

SEQ ID NO: 2020 - DNA, 10 bp, synthetic construct
  misc_feature 1..10: note = intronic recognition element for splicing modifier (REMS)
  source 1..10: mol_type = other DNA
ttgagtrgga

SEQ ID NO: 2021-2022 - skipped (2 entries)

SEQ ID NO: 2023 - DNA, 10 bp, synthetic construct
  misc_feature 1..10: note = intronic recognition element for splicing modifier (REMS)
  source 1..10: mol_type = other DNA
aagagtrtga

SEQ ID NO: 2024 - DNA, 10 bp, synthetic construct
  misc_feature 1..10: note = intronic recognition element for splicing modifier (REMS)
  source 1..10: mol_type = other DNA
cagagtrtga

SEQ ID NO: 2025 - DNA, 10 bp, synthetic construct
  misc_feature 1..10: note = intronic recognition element for splicing modifier (REMS)
  source 1..10: mol_type = other DNA
gagagtrtga

SEQ ID NO: 2026 - DNA, 10 bp, synthetic construct
  misc_feature 1..10: note = intronic recognition element for splicing modifier (REMS)
  source 1..10: mol_type = other DNA
tagagtrtga

SEQ ID NO: 2027-2028 - skipped (2 entries)

SEQ ID NO: 2029 - DNA, 10 bp, synthetic construct
  misc_feature 1..10: note = intronic recognition element for splicing modifier (REMS)
  source 1..10: mol_type = other DNA
acgagtrtga

SEQ ID NO: 2030 - DNA, 10 bp, synthetic construct
  misc_feature 1..10: note = intronic recognition element for splicing modifier (REMS)
  source 1..10: mol_type = other DNA
ccgagtrtga

SEQ ID NO: 2031 - DNA, 10 bp, synthetic construct
  misc_feature 1..10: note = intronic recognition element for splicing modifier (REMS)
  source 1..10: mol_type = other DNA
gcgagtrtga

SEQ ID NO: 2032 - DNA, 10 bp, synthetic construct
  misc_feature 1..10: note = intronic recognition element for splicing modifier (REMS)
  source 1..10: mol_type = other DNA
tcgagtrtga

SEQ ID NO: 2033-2034 - skipped (2 entries)

SEQ ID NO: 2035 - DNA, 10 bp, synthetic construct
  misc_feature 1..10: note = intronic recognition element for splicing modifier (REMS)
  source 1..10: mol_type = other DNA
aggagtrtga

SEQ ID NO: 2036 - DNA, 10 bp, synthetic construct
  misc_feature 1..10: note = intronic recognition element for splicing modifier (REMS)
  source 1..10: mol_type = other DNA
cggagtrtga

SEQ ID NO: 2037 - DNA, 10 bp, synthetic construct
  misc_feature 1..10: note = intronic recognition element for splicing modifier (REMS)
  source 1..10: mol_type = other DNA
gggagtrtga

SEQ ID NO: 2038 - DNA, 10 bp, synthetic construct
  misc_feature 1..10: note = intronic recognition element for splicing modifier (REMS)
  source 1..10: mol_type = other DNA
tggagtrtga

SEQ ID NO: 2039-2040 - skipped (2 entries)

SEQ ID NO: 2041 - DNA, 10 bp, synthetic construct
  misc_feature 1..10: note = intronic recognition element for splicing modifier (REMS)
  source 1..10: mol_type = other DNA
atgagtrtga

SEQ ID NO: 2042 - DNA, 10 bp, synthetic construct
  misc_feature 1..10: note = intronic recognition element for splicing modifier (REMS)
  source 1..10: mol_type = other DNA
ctgagtrtga

SEQ ID NO: 2043 - DNA, 10 bp, synthetic construct
  misc_feature 1..10: note = intronic recognition element for splicing modifier (REMS)
  source 1..10: mol_type = other DNA
gtgagtrtga

SEQ ID NO: 2044 - DNA, 10 bp, synthetic construct
  misc_feature 1..10: note = intronic recognition element for splicing modifier (REMS)
  source 1..10: mol_type = other DNA
ttgagtrtga

SEQ ID NO: 2045-2046 - skipped (2 entries)

SEQ ID NO: 2047 - DNA, 10 bp, synthetic construct
  misc_feature 1..10: note = intronic recognition element for splicing modifier (REMS)
  source 1..10: mol_type = other DNA
aagagtragc

SEQ ID NO: 2048 - DNA, 10 bp, synthetic construct
  misc_feature 1..10: note = intronic recognition element for splicing modifier (REMS)
  source 1..10: mol_type = other DNA
cagagtragc

SEQ ID NO: 2049 - DNA, 10 bp, synthetic construct
  misc_feature 1..10: note = intronic recognition element for splicing modifier (REMS)
  source 1..10: mol_type = other DNA
gagagtragc

SEQ ID NO: 2050 - DNA, 10 bp, synthetic construct
  misc_feature 1..10: note = intronic recognition element for splicing modifier (REMS)
  source 1..10: mol_type = other DNA
tagagtragc

SEQ ID NO: 2051-2052 - skipped (2 entries)

SEQ ID NO: 2053 - DNA, 10 bp, synthetic construct
  misc_feature 1..10: note = intronic recognition element for splicing modifier (REMS)
  source 1..10: mol_type = other DNA
acgagtragc

SEQ ID NO: 2054 - DNA, 10 bp, synthetic construct
  misc_feature 1..10: note = intronic recognition element for splicing modifier (REMS)
  source 1..10: mol_type = other DNA
ccgagtragc

SEQ ID NO: 2055 - DNA, 10 bp, synthetic construct
  misc_feature 1..10: note = intronic recognition element for splicing modifier (REMS)
  source 1..10: mol_type = other DNA
gcgagtragc

SEQ ID NO: 2056 - DNA, 10 bp, synthetic construct
  misc_feature 1..10: note = intronic recognition element for splicing modifier (REMS)
  source 1..10: mol_type = other DNA
tcgagtragc

SEQ ID NO: 2057-2058 - skipped (2 entries)

SEQ ID NO: 2059 - DNA, 10 bp, synthetic construct
  misc_feature 1..10: note = intronic recognition element for splicing modifier (REMS)
  source 1..10: mol_type = other DNA
aggagtragc

SEQ ID NO: 2060 - DNA, 10 bp, synthetic construct
  misc_feature 1..10: note = intronic recognition element for splicing modifier (REMS)
  source 1..10: mol_type = other DNA
cggagtragc

SEQ ID NO: 2061 - DNA, 10 bp, synthetic construct
  misc_feature 1..10: note = intronic recognition element for splicing modifier (REMS)
  source 1..10: mol_type = other DNA
gggagtragc

SEQ ID NO: 2062 - DNA, 10 bp, synthetic construct
  misc_feature 1..10: note = intronic recognition element for splicing modifier (REMS)
  source 1..10: mol_type = other DNA
tggagtragc

SEQ ID NO: 2063-2064 - skipped (2 entries)

SEQ ID NO: 2065 - DNA, 10 bp, synthetic construct
  misc_feature 1..10: note = intronic recognition element for splicing modifier (REMS)
  source 1..10: mol_type = other DNA
atgagtragc

SEQ ID NO: 2066 - DNA, 10 bp, synthetic construct
  misc_feature 1..10: note = intronic recognition element for splicing modifier (REMS)
  source 1..10: mol_type = other DNA
ctgagtragc

SEQ ID NO: 2067 - DNA, 10 bp, synthetic construct
  misc_feature 1..10: note = intronic recognition element for splicing modifier (REMS)
  source 1..10: mol_type = other DNA
gtgagtragc

SEQ ID NO: 2068 - DNA, 10 bp, synthetic construct
  misc_feature 1..10: note = intronic recognition element for splicing modifier (REMS)
  source 1..10: mol_type = other DNA
ttgagtragc

SEQ ID NO: 2069-2070 - skipped (2 entries)

SEQ ID NO: 2071 - DNA, 10 bp, synthetic construct
  misc_feature 1..10: note = intronic recognition element for splicing modifier (REMS)
  source 1..10: mol_type = other DNA
aagagtrcgc

SEQ ID NO: 2072 - DNA, 10 bp, synthetic construct
  misc_feature 1..10: note = intronic recognition element for splicing modifier (REMS)
  source 1..10: mol_type = other DNA
cagagtrcgc

SEQ ID NO: 2073 - DNA, 10 bp, synthetic construct
  misc_feature 1..10: note = intronic recognition element for splicing modifier (REMS)
  source 1..10: mol_type = other DNA
gagagtrcgc

SEQ ID NO: 2074 - DNA, 10 bp, synthetic construct
  misc_feature 1..10: note = intronic recognition element for splicing modifier (REMS)
  source 1..10: mol_type = other DNA
tagagtrcgc

SEQ ID NO: 2075-2076 - skipped (2 entries)

SEQ ID NO: 2077 - DNA, 10 bp, synthetic construct
  misc_feature 1..10: note = intronic recognition element for splicing modifier (REMS)
  source 1..10: mol_type = other DNA
acgagtrcgc

SEQ ID NO: 2078 - DNA, 10 bp, synthetic construct
  misc_feature 1..10: note = intronic recognition element for splicing modifier (REMS)
  source 1..10: mol_type = other DNA
ccgagtrcgc

SEQ ID NO: 2079 - DNA, 10 bp, synthetic construct
  misc_feature 1..10: note = intronic recognition element for splicing modifier (REMS)
  source 1..10: mol_type = other DNA
gcgagtrcgc

SEQ ID NO: 2080 - DNA, 10 bp, synthetic construct
  misc_feature 1..10: note = intronic recognition element for splicing modifier (REMS)
  source 1..10: mol_type = other DNA
tcgagtrcgc

SEQ ID NO: 2081-2082 - skipped (2 entries)

SEQ ID NO: 2083 - DNA, 10 bp, synthetic construct
  misc_feature 1..10: note = intronic recognition element for splicing modifier (REMS)
  source 1..10: mol_type = other DNA
aggagtrcgc

SEQ ID NO: 2084 - DNA, 10 bp, synthetic construct
  misc_feature 1..10: note = intronic recognition element for splicing modifier (REMS)
  source 1..10: mol_type = other DNA
cggagtrcgc

SEQ ID NO: 2085 - DNA, 10 bp, synthetic construct
  misc_feature 1..10: note = intronic recognition element for splicing modifier (REMS)
  source 1..10: mol_type = other DNA
gggagtrcgc

SEQ ID NO: 2086 - DNA, 10 bp, synthetic construct
  misc_feature 1..10: note = intronic recognition element for splicing modifier (REMS)
  source 1..10: mol_type = other DNA
tggagtrcgc

SEQ ID NO: 2087-2088 - skipped (2 entries)

SEQ ID NO: 2089 - DNA, 10 bp, synthetic construct
  misc_feature 1..10: note = intronic recognition element for splicing modifier (REMS)
  source 1..10: mol_type = other DNA
atgagtrcgc

SEQ ID NO: 2090 - DNA, 10 bp, synthetic construct
  misc_feature 1..10: note = intronic recognition element for splicing modifier (REMS)
  source 1..10: mol_type = other DNA
ctgagtrcgc

SEQ ID NO: 2091 - DNA, 10 bp, synthetic construct
  misc_feature 1..10: note = intronic recognition element for splicing modifier (REMS)
  source 1..10: mol_type = other DNA
gtgagtrcgc

SEQ ID NO: 2092 - DNA, 10 bp, synthetic construct
  misc_feature 1..10: note = intronic recognition element for splicing modifier (REMS)
  source 1..10: mol_type = other DNA
ttgagtrcgc

SEQ ID NO: 2093-2094 - skipped (2 entries)

SEQ ID NO: 2095 - DNA, 10 bp, synthetic construct
  misc_feature 1..10: note = intronic recognition element for splicing modifier (REMS)
  source 1..10: mol_type = other DNA
aagagtrggc

SEQ ID NO: 2096 - DNA, 10 bp, synthetic construct
  misc_feature 1..10: note = intronic recognition element for splicing modifier (REMS)
  source 1..10: mol_type = other DNA
cagagtrggc

SEQ ID NO: 2097 - DNA, 10 bp, synthetic construct
  misc_feature 1..10: note = intronic recognition element for splicing modifier (REMS)
  source 1..10: mol_type = other DNA
gagagtrggc

SEQ ID NO: 2098 - DNA, 10 bp, synthetic construct
  misc_feature 1..10: note = intronic recognition element for splicing modifier (REMS)
  source 1..10: mol_type = other DNA
tagagtrggc

SEQ ID NO: 2099-2100 - skipped (2 entries)

SEQ ID NO: 2101 - DNA, 10 bp, synthetic construct
  misc_feature 1..10: note = intronic recognition element for splicing modifier (REMS)
  source 1..10: mol_type = other DNA
acgagtrggc

SEQ ID NO: 2102 - DNA, 10 bp, synthetic construct
  misc_feature 1..10: note = intronic recognition element for splicing modifier (REMS)
  source 1..10: mol_type = other DNA
ccgagtrggc

SEQ ID NO: 2103 - DNA, 10 bp, synthetic construct
  misc_feature 1..10: note = intronic recognition element for splicing modifier (REMS)
  source 1..10: mol_type = other DNA
gcgagtrggc

SEQ ID NO: 2104 - DNA, 10 bp, synthetic construct
  misc_feature 1..10: note = intronic recognition element for splicing modifier (REMS)
  source 1..10: mol_type = other DNA
tcgagtrggc

SEQ ID NO: 2105-2106 - skipped (2 entries)

SEQ ID NO: 2107 - DNA, 10 bp, synthetic construct
  misc_feature 1..10: note = intronic recognition element for splicing modifier (REMS)
  source 1..10: mol_type = other DNA
aggagtrggc

SEQ ID NO: 2108 - DNA, 10 bp, synthetic construct
  misc_feature 1..10: note = intronic recognition element for splicing modifier (REMS)
  source 1..10: mol_type = other DNA
cggagtrggc

SEQ ID NO: 2109 - DNA, 10 bp, synthetic construct
  misc_feature 1..10: note = intronic recognition element for splicing modifier (REMS)
  source 1..10: mol_type = other DNA
gggagtrggc

SEQ ID NO: 2110 - DNA, 10 bp, synthetic construct
  misc_feature 1..10: note = intronic recognition element for splicing modifier (REMS)
  source 1..10: mol_type = other DNA
tggagtrggc

SEQ ID NO: 2111-2112 - skipped (2 entries)

SEQ ID NO: 2113 - DNA, 10 bp, synthetic construct
  misc_feature 1..10: note = intronic recognition element for splicing modifier (REMS)
  source 1..10: mol_type = other DNA
atgagtrggc

SEQ ID NO: 2114 - DNA, 10 bp, synthetic construct
  misc_feature 1..10: note = intronic recognition element for splicing modifier (REMS)
  source 1..10: mol_type = other DNA
ctgagtrggc

SEQ ID NO: 2115 - DNA, 10 bp, synthetic construct
  misc_feature 1..10: note = intronic recognition element for splicing modifier (REMS)
  source 1..10: mol_type = other DNA
gtgagtrggc

SEQ ID NO: 2116 - DNA, 10 bp, synthetic construct
  misc_feature 1..10: note = intronic recognition element for splicing modifier (REMS)
  source 1..10: mol_type = other DNA
ttgagtrggc

SEQ ID NO: 2117-2118 - skipped (2 entries)

SEQ ID NO: 2119 - DNA, 10 bp, synthetic construct
  misc_feature 1..10: note = intronic recognition element for splicing modifier (REMS)
  source 1..10: mol_type = other DNA
aagagtrtgc

SEQ ID NO: 2120 - DNA, 10 bp, synthetic construct
  misc_feature 1..10: note = intronic recognition element for splicing modifier (REMS)
  source 1..10: mol_type = other DNA
cagagtrtgc

SEQ ID NO: 2121 - DNA, 10 bp, synthetic construct
  misc_feature 1..10: note = intronic recognition element for splicing modifier (REMS)
  source 1..10: mol_type = other DNA
gagagtrtgc

SEQ ID NO: 2122 - DNA, 10 bp, synthetic construct
  misc_feature 1..10: note = intronic recognition element for splicing modifier (REMS)
  source 1..10: mol_type = other DNA
tagagtrtgc

SEQ ID NO: 2123-2124 - skipped (2 entries)

SEQ ID NO: 2125 - DNA, 10 bp, synthetic construct
  misc_feature 1..10: note = intronic recognition element for splicing modifier (REMS)
  source 1..10: mol_type = other DNA
acgagtrtgc

SEQ ID NO: 2126 - DNA, 10 bp, synthetic construct
  misc_feature 1..10: note = intronic recognition element for splicing modifier (REMS)
  source 1..10: mol_type = other DNA
ccgagtrtgc

SEQ ID NO: 2127 - DNA, 10 bp, synthetic construct
  misc_feature 1..10: note = intronic recognition element for splicing modifier (REMS)
  source 1..10: mol_type = other DNA
gcgagtrtgc

SEQ ID NO: 2128 - DNA, 10 bp, synthetic construct
  misc_feature 1..10: note = intronic recognition element for splicing modifier (REMS)
  source 1..10: mol_type = other DNA
tcgagtrtgc

SEQ ID NO: 2129-2130 - skipped (2 entries)

SEQ ID NO: 2131 - DNA, 10 bp, synthetic construct
  misc_feature 1..10: note = intronic recognition element for splicing modifier (REMS)
  source 1..10: mol_type = other DNA
aggagtrtgc

SEQ ID NO: 2132 - DNA, 10 bp, synthetic construct
  misc_feature 1..10: note = intronic recognition element for splicing modifier (REMS)
  source 1..10: mol_type = other DNA
cggagtrtgc

SEQ ID NO: 2133 - DNA, 10 bp, synthetic construct
  misc_feature 1..10: note = intronic recognition element for splicing modifier (REMS)
  source 1..10: mol_type = other DNA
gggagtrtgc

SEQ ID NO: 2134 - DNA, 10 bp, synthetic construct
  misc_feature 1..10: note = intronic recognition element for splicing modifier (REMS)
  source 1..10: mol_type = other DNA
tggagtrtgc

SEQ ID NO: 2135-2136 - skipped (2 entries)

SEQ ID NO: 2137 - DNA, 10 bp, synthetic construct
  misc_feature 1..10: note = intronic recognition element for splicing modifier (REMS)
  source 1..10: mol_type = other DNA
atgagtrtgc

SEQ ID NO: 2138 - DNA, 10 bp, synthetic construct
  misc_feature 1..10: note = intronic recognition element for splicing modifier (REMS)
  source 1..10: mol_type = other DNA
ctgagtrtgc

SEQ ID NO: 2139 - DNA, 10 bp, synthetic construct
  misc_feature 1..10: note = intronic recognition element for splicing modifier (REMS)
  source 1..10: mol_type = other DNA
gtgagtrtgc

SEQ ID NO: 2140 - DNA, 10 bp, synthetic construct
  misc_feature 1..10: note = intronic recognition element for splicing modifier (REMS)
  source 1..10: mol_type = other DNA
ttgagtrtgc

SEQ ID NO: 2141-2142 - skipped (2 entries)

SEQ ID NO: 2143 - DNA, 10 bp, synthetic construct
  misc_feature 1..10: note = intronic recognition element for splicing modifier (REMS)
  source 1..10: mol_type = other DNA
aagagtragg

SEQ ID NO: 2144 - DNA, 10 bp, synthetic construct
  misc_feature 1..10: note = intronic recognition element for splicing modifier (REMS)
  source 1..10: mol_type = other DNA
cagagtragg

SEQ ID NO: 2145 - DNA, 10 bp, synthetic construct
  misc_feature 1..10: note = intronic recognition element for splicing modifier (REMS)
  source 1..10: mol_type = other DNA
gagagtragg

SEQ ID NO: 2146 - DNA, 10 bp, synthetic construct
  misc_feature 1..10: note = intronic recognition element for splicing modifier (REMS)
  source 1..10: mol_type = other DNA
tagagtragg

SEQ ID NO: 2147-2148 - skipped (2 entries)

SEQ ID NO: 2149 - DNA, 10 bp, synthetic construct
  misc_feature 1..10: note = intronic recognition element for splicing modifier (REMS)
  source 1..10: mol_type = other DNA
acgagtragg

SEQ ID NO: 2150 - DNA, 10 bp, synthetic construct
  misc_feature 1..10: note = intronic recognition element for splicing modifier (REMS)
  source 1..10: mol_type = other DNA
ccgagtragg

SEQ ID NO: 2151 - DNA, 10 bp, synthetic construct
  misc_feature 1..10: note = intronic recognition element for splicing modifier (REMS)
  source 1..10: mol_type = other DNA
gcgagtragg

SEQ ID NO: 2152 - DNA, 10 bp, synthetic construct
  misc_feature 1..10: note = intronic recognition element for splicing modifier (REMS)
  source 1..10: mol_type = other DNA
tcgagtragg

SEQ ID NO: 2153-2154 - skipped (2 entries)

SEQ ID NO: 2155 - DNA, 10 bp, synthetic construct
  misc_feature 1..10: note = intronic recognition element for splicing modifier (REMS)
  source 1..10: mol_type = other DNA
aggagtragg

SEQ ID NO: 2156 - DNA, 10 bp, synthetic construct
  misc_feature 1..10: note = intronic recognition element for splicing modifier (REMS)
  source 1..10: mol_type = other DNA
cggagtragg

SEQ ID NO: 2157 - DNA, 10 bp, synthetic construct
  misc_feature 1..10: note = intronic recognition element for splicing modifier (REMS)
  source 1..10: mol_type = other DNA
gggagtragg

SEQ ID NO: 2158 - DNA, 10 bp, synthetic construct
  misc_feature 1..10: note = intronic recognition element for splicing modifier (REMS)
  source 1..10: mol_type = other DNA
tggagtragg

SEQ ID NO: 2159-2160 - skipped (2 entries)

SEQ ID NO: 2161 - DNA, 10 bp, synthetic construct
  misc_feature 1..10: note = intronic recognition element for splicing modifier (REMS)
  source 1..10: mol_type = other DNA
atgagtragg

SEQ ID NO: 2162 - DNA, 10 bp, synthetic construct
  misc_feature 1..10: note = intronic recognition element for splicing modifier (REMS)
  source 1..10: mol_type = other DNA
ctgagtragg

SEQ ID NO: 2163 - DNA, 10 bp, synthetic construct
  misc_feature 1..10: note = intronic recognition element for splicing modifier (REMS)
  source 1..10: mol_type = other DNA
gtgagtragg

SEQ ID NO: 2164 - DNA, 10 bp, synthetic construct
  misc_feature 1..10: note = intronic recognition element for splicing modifier (REMS)
  source 1..10: mol_type = other DNA
ttgagtragg

SEQ ID NO: 2165-2166 - skipped (2 entries)

SEQ ID NO: 2167 - DNA, 10 bp, synthetic construct
  misc_feature 1..10: note = intronic recognition element for splicing modifier (REMS)
  source 1..10: mol_type = other DNA
aagagtrcgg

SEQ ID NO: 2168 - DNA, 10 bp, synthetic construct
  misc_feature 1..10: note = intronic recognition element for splicing modifier (REMS)
  source 1..10: mol_type = other DNA
cagagtrcgg

SEQ ID NO: 2169 - DNA, 10 bp, synthetic construct
  misc_feature 1..10: note = intronic recognition element for splicing modifier (REMS)
  source 1..10: mol_type = other DNA
gagagtrcgg

SEQ ID NO: 2170 - DNA, 10 bp, synthetic construct
  misc_feature 1..10: note = intronic recognition element for splicing modifier (REMS)
  source 1..10: mol_type = other DNA
tagagtrcgg

SEQ ID NO: 2171-2172 - skipped (2 entries)

SEQ ID NO: 2173 - DNA, 10 bp, synthetic construct
  misc_feature 1..10: note = intronic recognition element for splicing modifier (REMS)
  source 1..10: mol_type = other DNA
acgagtrcgg

SEQ ID NO: 2174 - DNA, 10 bp, synthetic construct
  misc_feature 1..10: note = intronic recognition element for splicing modifier (REMS)
  source 1..10: mol_type = other DNA
ccgagtrcgg

SEQ ID NO: 2175 - DNA, 10 bp, synthetic construct
  misc_feature 1..10: note = intronic recognition element for splicing modifier (REMS)
  source 1..10: mol_type = other DNA
gcgagtrcgg

SEQ ID NO: 2176 - DNA, 10 bp, synthetic construct
  misc_feature 1..10: note = intronic recognition element for splicing modifier (REMS)
  source 1..10: mol_type = other DNA
tcgagtrcgg

SEQ ID NO: 2177-2178 - skipped (2 entries)

SEQ ID NO: 2179 - DNA, 10 bp, synthetic construct
  misc_feature 1..10: note = intronic recognition element for splicing modifier (REMS)
  source 1..10: mol_type = other DNA
aggagtrcgg

SEQ ID NO: 2180 - DNA, 10 bp, synthetic construct
  misc_feature 1..10: note = intronic recognition element for splicing modifier (REMS)
  source 1..10: mol_type = other DNA
cggagtrcgg

SEQ ID NO: 2181 - DNA, 10 bp, synthetic construct
  misc_feature 1..10: note = intronic recognition element for splicing modifier (REMS)
  source 1..10: mol_type = other DNA
gggagtrcgg

SEQ ID NO: 2182 - DNA, 10 bp, synthetic construct
  misc_feature 1..10: note = intronic recognition element for splicing modifier (REMS)
  source 1..10: mol_type = other DNA
tggagtrcgg

SEQ ID NO: 2183-2184 - skipped (2 entries)

SEQ ID NO: 2185 - DNA, 10 bp, synthetic construct
  misc_feature 1..10: note = intronic recognition element for splicing modifier (REMS)
  source 1..10: mol_type = other DNA
atgagtrcgg

SEQ ID NO: 2186 - DNA, 10 bp, synthetic construct
  misc_feature 1..10: note = intronic recognition element for splicing modifier (REMS)
  source 1..10: mol_type = other DNA
ctgagtrcgg

SEQ ID NO: 2187 - DNA, 10 bp, synthetic construct
  misc_feature 1..10: note = intronic recognition element for splicing modifier (REMS)
  source 1..10: mol_type = other DNA
gtgagtrcgg

SEQ ID NO: 2188 - DNA, 10 bp, synthetic construct
  misc_feature 1..10: note = intronic recognition element for splicing modifier (REMS)
  source 1..10: mol_type = other DNA
ttgagtrcgg

SEQ ID NO: 2189-2190 - skipped (2 entries)

SEQ ID NO: 2191 - DNA, 10 bp, synthetic construct
  misc_feature 1..10: note = intronic recognition element for splicing modifier (REMS)
  source 1..10: mol_type = other DNA
aagagtrggg

SEQ ID NO: 2192 - DNA, 10 bp, synthetic construct
  misc_feature 1..10: note = intronic recognition element for splicing modifier (REMS)
  source 1..10: mol_type = other DNA
cagagtrggg

SEQ ID NO: 2193 - DNA, 10 bp, synthetic construct
  misc_feature 1..10: note = intronic recognition element for splicing modifier (REMS)
  source 1..10: mol_type = other DNA
gagagtrggg

SEQ ID NO: 2194 - DNA, 10 bp, synthetic construct
  misc_feature 1..10: note = intronic recognition element for splicing modifier (REMS)
  source 1..10: mol_type = other DNA
tagagtrggg

SEQ ID NO: 2195-2196 - skipped (2 entries)

SEQ ID NO: 2197 - DNA, 10 bp, synthetic construct
  misc_feature 1..10: note = intronic recognition element for splicing modifier (REMS)
  source 1..10: mol_type = other DNA
acgagtrggg

SEQ ID NO: 2198 - DNA, 10 bp, synthetic construct
  misc_feature 1..10: note = intronic recognition element for splicing modifier (REMS)
  source 1..10: mol_type = other DNA
ccgagtrggg

SEQ ID NO: 2199 - DNA, 10 bp, synthetic construct
  misc_feature 1..10: note = intronic recognition element for splicing modifier (REMS)
  source 1..10: mol_type = other DNA
gcgagtrggg

SEQ ID NO: 2200 - DNA, 10 bp, synthetic construct
  misc_feature 1..10: note = intronic recognition element for splicing modifier (REMS)
  source 1..10: mol_type = other DNA
tcgagtrggg

SEQ ID NO: 2201-2202 - skipped (2 entries)

SEQ ID NO: 2203 - DNA, 10 bp, synthetic construct
  misc_feature 1..10: note = intronic recognition element for splicing modifier (REMS)
  source 1..10: mol_type = other DNA
aggagtrggg

SEQ ID NO: 2204 - DNA, 10 bp, synthetic construct
  misc_feature 1..10: note = intronic recognition element for splicing modifier (REMS)
  source 1..10: mol_type = other DNA
cggagtrggg

SEQ ID NO: 2205 - DNA, 10 bp, synthetic construct
  misc_feature 1..10: note = intronic recognition element for splicing modifier (REMS)
  source 1..10: mol_type = other DNA
gggagtrggg

SEQ ID NO: 2206 - DNA, 10 bp, synthetic construct
  misc_feature 1..10: note = intronic recognition element for splicing modifier (REMS)
  source 1..10: mol_type = other DNA
tggagtrggg

SEQ ID NO: 2207-2208 - skipped (2 entries)

SEQ ID NO: 2209 - DNA, 10 bp, synthetic construct
  misc_feature 1..10: note = intronic recognition element for splicing modifier (REMS)
  source 1..10: mol_type = other DNA
atgagtrggg

SEQ ID NO: 2210 - DNA, 10 bp, synthetic construct
  misc_feature 1..10: note = intronic recognition element for splicing modifier (REMS)
  source 1..10: mol_type = other DNA
ctgagtrggg

SEQ ID NO: 2211 - DNA, 10 bp, synthetic construct
  misc_feature 1..10: note = intronic recognition element for splicing modifier (REMS)
  source 1..10: mol_type = other DNA
gtgagtrggg

SEQ ID NO: 2212 - DNA, 10 bp, synthetic construct
  misc_feature 1..10: note = intronic recognition element for splicing modifier (REMS)
  source 1..10: mol_type = other DNA
ttgagtrggg

SEQ ID NO: 2213-2214 - skipped (2 entries)

SEQ ID NO: 2215 - DNA, 10 bp, synthetic construct
  misc_feature 1..10: note = intronic recognition element for splicing modifier (REMS)
  source 1..10: mol_type = other DNA
aagagtrtgg

SEQ ID NO: 2216 - DNA, 10 bp, synthetic construct
  misc_feature 1..10: note = intronic recognition element for splicing modifier (REMS)
  source 1..10: mol_type = other DNA
cagagtrtgg

SEQ ID NO: 2217 - DNA, 10 bp, synthetic construct
  misc_feature 1..10: note = intronic recognition element for splicing modifier (REMS)
  source 1..10: mol_type = other DNA
gagagtrtgg

SEQ ID NO: 2218 - DNA, 10 bp, synthetic construct
  misc_feature 1..10: note = intronic recognition element for splicing modifier (REMS)
  source 1..10: mol_type = other DNA
tagagtrtgg

SEQ ID NO: 2219-2220 - skipped (2 entries)

SEQ ID NO: 2221 - DNA, 10 bp, synthetic construct
  misc_feature 1..10: note = intronic recognition element for splicing modifier (REMS)
  source 1..10: mol_type = other DNA
acgagtrtgg

SEQ ID NO: 2222 - DNA, 10 bp, synthetic construct
  misc_feature 1..10: note = intronic recognition element for splicing modifier (REMS)
  source 1..10: mol_type = other DNA
ccgagtrtgg

SEQ ID NO: 2223 - DNA, 10 bp, synthetic construct
  misc_feature 1..10: note = intronic recognition element for splicing modifier (REMS)
  source 1..10: mol_type = other DNA
gcgagtrtgg

SEQ ID NO: 2224 - DNA, 10 bp, synthetic construct
  misc_feature 1..10: note = intronic recognition element for splicing modifier (REMS)
  source 1..10: mol_type = other DNA
tcgagtrtgg

SEQ ID NO: 2225-2226 - skipped (2 entries)

SEQ ID NO: 2227 - DNA, 10 bp, synthetic construct
  misc_feature 1..10: note = intronic recognition element for splicing modifier (REMS)
  source 1..10: mol_type = other DNA
aggagtrtgg

SEQ ID NO: 2228 - DNA, 10 bp, synthetic construct
  misc_feature 1..10: note = intronic recognition element for splicing modifier (REMS)
  source 1..10: mol_type = other DNA
cggagtrtgg

SEQ ID NO: 2229 - DNA, 10 bp, synthetic construct
  misc_feature 1..10: note = intronic recognition element for splicing modifier (REMS)
  source 1..10: mol_type = other DNA
gggagtrtgg

SEQ ID NO: 2230 - DNA, 10 bp, synthetic construct
  misc_feature 1..10: note = intronic recognition element for splicing modifier (REMS)
  source 1..10: mol_type = other DNA
tggagtrtgg

SEQ ID NO: 2231-2232 - skipped (2 entries)

SEQ ID NO: 2233 - DNA, 10 bp, synthetic construct
  misc_feature 1..10: note = intronic recognition element for splicing modifier (REMS)
  source 1..10: mol_type = other DNA
atgagtrtgg

SEQ ID NO: 2234 - DNA, 10 bp, synthetic construct
  misc_feature 1..10: note = intronic recognition element for splicing modifier (REMS)
  source 1..10: mol_type = other DNA
ctgagtrtgg

SEQ ID NO: 2235 - DNA, 10 bp, synthetic construct
  misc_feature 1..10: note = intronic recognition element for splicing modifier (REMS)
  source 1..10: mol_type = other DNA
gtgagtrtgg

SEQ ID NO: 2236 - DNA, 10 bp, synthetic construct
  misc_feature 1..10: note = intronic recognition element for splicing modifier (REMS)
  source 1..10: mol_type = other DNA
ttgagtrtgg

SEQ ID NO: 2237-2238 - skipped (2 entries)

SEQ ID NO: 2239 - DNA, 10 bp, synthetic construct
  misc_feature 1..10: note = intronic recognition element for splicing modifier (REMS)
  source 1..10: mol_type = other DNA
aagagtragt

SEQ ID NO: 2240 - DNA, 10 bp, synthetic construct
  misc_feature 1..10: note = intronic recognition element for splicing modifier (REMS)
  source 1..10: mol_type = other DNA
cagagtragt

SEQ ID NO: 2241 - DNA, 10 bp, synthetic construct
  misc_feature 1..10: note = intronic recognition element for splicing modifier (REMS)
  source 1..10: mol_type = other DNA
gagagtragt

SEQ ID NO: 2242 - DNA, 10 bp, synthetic construct
  misc_feature 1..10: note = intronic recognition element for splicing modifier (REMS)
  source 1..10: mol_type = other DNA
tagagtragt

SEQ ID NO: 2243-2244 - skipped (2 entries)

SEQ ID NO: 2245 - DNA, 10 bp, synthetic construct
  misc_feature 1..10: note = intronic recognition element for splicing modifier (REMS)
  source 1..10: mol_type = other DNA
acgagtragt

SEQ ID NO: 2246 - DNA, 10 bp, synthetic construct
  misc_feature 1..10: note = intronic recognition element for splicing modifier (REMS)
  source 1..10: mol_type = other DNA
ccgagtragt

SEQ ID NO: 2247 - DNA, 10 bp, synthetic construct
  misc_feature 1..10: note = intronic recognition element for splicing modifier (REMS)
  source 1..10: mol_type = other DNA
gcgagtragt

SEQ ID NO: 2248 - DNA, 10 bp, synthetic construct
  misc_feature 1..10: note = intronic recognition element for splicing modifier (REMS)
  source 1..10: mol_type = other DNA
tcgagtragt

SEQ ID NO: 2249-2250 - skipped (2 entries)

SEQ ID NO: 2251 - DNA, 10 bp, synthetic construct
  misc_feature 1..10: note = intronic recognition element for splicing modifier (REMS)
  source 1..10: mol_type = other DNA
aggagtragt

SEQ ID NO: 2252 - DNA, 10 bp, synthetic construct
  misc_feature 1..10: note = intronic recognition element for splicing modifier (REMS)
  source 1..10: mol_type = other DNA
cggagtragt

SEQ ID NO: 2253 - DNA, 10 bp, synthetic construct
  misc_feature 1..10: note = intronic recognition element for splicing modifier (REMS)
  source 1..10: mol_type = other DNA
gggagtragt

SEQ ID NO: 2254 - DNA, 10 bp, synthetic construct
  misc_feature 1..10: note = intronic recognition element for splicing modifier (REMS)
  source 1..10: mol_type = other DNA
tggagtragt

SEQ ID NO: 2255-2256 - skipped (2 entries)

SEQ ID NO: 2257 - DNA, 10 bp, synthetic construct
  misc_feature 1..10: note = intronic recognition element for splicing modifier (REMS)
  source 1..10: mol_type = other DNA
atgagtragt

SEQ ID NO: 2258 - DNA, 10 bp, synthetic construct
  misc_feature 1..10: note = intronic recognition element for splicing modifier (REMS)
  source 1..10: mol_type = other DNA
ctgagtragt

SEQ ID NO: 2259 - DNA, 10 bp, synthetic construct
  misc_feature 1..10: note = intronic recognition element for splicing modifier (REMS)
  source 1..10: mol_type = other DNA
gtgagtragt

SEQ ID NO: 2260 - DNA, 10 bp, synthetic construct
  misc_feature 1..10: note = intronic recognition element for splicing modifier (REMS)
  source 1..10: mol_type = other DNA
ttgagtragt

SEQ ID NO: 2261-2262 - skipped (2 entries)

SEQ ID NO: 2263 - DNA, 10 bp, synthetic construct
  misc_feature 1..10: note = intronic recognition element for splicing modifier (REMS)
  source 1..10: mol_type = other DNA
aagagtrcgt

SEQ ID NO: 2264 - DNA, 10 bp, synthetic construct
  misc_feature 1..10: note = intronic recognition element for splicing modifier (REMS)
  source 1..10: mol_type = other DNA
cagagtrcgt

SEQ ID NO: 2265 - DNA, 10 bp, synthetic construct
  misc_feature 1..10: note = intronic recognition element for splicing modifier (REMS)
  source 1..10: mol_type = other DNA
gagagtrcgt

SEQ ID NO: 2266 - DNA, 10 bp, synthetic construct
  misc_feature 1..10: note = intronic recognition element for splicing modifier (REMS)
  source 1..10: mol_type = other DNA
tagagtrcgt

SEQ ID NO: 2267-2268 - skipped (2 entries)

SEQ ID NO: 2269 - DNA, 10 bp, synthetic construct
  misc_feature 1..10: note = intronic recognition element for splicing modifier (REMS)
  source 1..10: mol_type = other DNA
acgagtrcgt

SEQ ID NO: 2270 - DNA, 10 bp, synthetic construct
  misc_feature 1..10: note = intronic recognition element for splicing modifier (REMS)
  source 1..10: mol_type = other DNA
ccgagtrcgt

SEQ ID NO: 2271 - DNA, 10 bp, synthetic construct
  misc_feature 1..10: note = intronic recognition element for splicing modifier (REMS)
  source 1..10: mol_type = other DNA
gcgagtrcgt

SEQ ID NO: 2272 - DNA, 10 bp, synthetic construct
  misc_feature 1..10: note = intronic recognition element for splicing modifier (REMS)
  source 1..10: mol_type = other DNA
tcgagtrcgt

SEQ ID NO: 2273-2274 - skipped (2 entries)

SEQ ID NO: 2275 - DNA, 10 bp, synthetic construct
  misc_feature 1..10: note = intronic recognition element for splicing modifier (REMS)
  source 1..10: mol_type = other DNA
aggagtrcgt

SEQ ID NO: 2276 - DNA, 10 bp, synthetic construct
  misc_feature 1..10: note = intronic recognition element for splicing modifier (REMS)
  source 1..10: mol_type = other DNA
cggagtrcgt

SEQ ID NO: 2277 - DNA, 10 bp, synthetic construct
  misc_feature 1..10: note = intronic recognition element for splicing modifier (REMS)
  source 1..10: mol_type = other DNA
gggagtrcgt

SEQ ID NO: 2278 - DNA, 10 bp, synthetic construct
  misc_feature 1..10: note = intronic recognition element for splicing modifier (REMS)
  source 1..10: mol_type = other DNA
tggagtrcgt

SEQ ID NO: 2279-2280 - skipped (2 entries)

SEQ ID NO: 2281 - DNA, 10 bp, synthetic construct
  misc_feature 1..10: note = intronic recognition element for splicing modifier (REMS)
  source 1..10: mol_type = other DNA
atgagtrcgt

SEQ ID NO: 2282 - DNA, 10 bp, synthetic construct
  misc_feature 1..10: note = intronic recognition element for splicing modifier (REMS)
  source 1..10: mol_type = other DNA
ctgagtrcgt

SEQ ID NO: 2283 - DNA, 10 bp, synthetic construct
  misc_feature 1..10: note = intronic recognition element for splicing modifier (REMS)
  source 1..10: mol_type = other DNA
gtgagtrcgt

SEQ ID NO: 2284 - DNA, 10 bp, synthetic construct
  misc_feature 1..10: note = intronic recognition element for splicing modifier (REMS)
  source 1..10: mol_type = other DNA
ttgagtrcgt

SEQ ID NO: 2285-2286 - skipped (2 entries)

SEQ ID NO: 2287 - DNA, 10 bp, synthetic construct
  misc_feature 1..10: note = intronic recognition element for splicing modifier (REMS)
  source 1..10: mol_type = other DNA
aagagtrggt

SEQ ID NO: 2288 - DNA, 10 bp, synthetic construct
  misc_feature 1..10: note = intronic recognition element for splicing modifier (REMS)
  source 1..10: mol_type = other DNA
cagagtrggt

SEQ ID NO: 2289 - DNA, 10 bp, synthetic construct
  misc_feature 1..10: note = intronic recognition element for splicing modifier (REMS)
  source 1..10: mol_type = other DNA
gagagtrggt

SEQ ID NO: 2290 - DNA, 10 bp, synthetic construct
  misc_feature 1..10: note = intronic recognition element for splicing modifier (REMS)
  source 1..10: mol_type = other DNA
tagagtrggt

SEQ ID NO: 2291-2292 - skipped (2 entries)

SEQ ID NO: 2293 - DNA, 10 bp, synthetic construct
  misc_feature 1..10: note = intronic recognition element for splicing modifier (REMS)
  source 1..10: mol_type = other DNA
acgagtrggt

SEQ ID NO: 2294 - DNA, 10 bp, synthetic construct
  misc_feature 1..10: note = intronic recognition element for splicing modifier (REMS)
  source 1..10: mol_type = other DNA
ccgagtrggt

SEQ ID NO: 2295 - DNA, 10 bp, synthetic construct
  misc_feature 1..10: note = intronic recognition element for splicing modifier (REMS)
  source 1..10: mol_type = other DNA
gcgagtrggt

SEQ ID NO: 2296 - DNA, 10 bp, synthetic construct
  misc_feature 1..10: note = intronic recognition element for splicing modifier (REMS)
  source 1..10: mol_type = other DNA
tcgagtrggt

SEQ ID NO: 2297-2298 - skipped (2 entries)

SEQ ID NO: 2299 - DNA, 10 bp, synthetic construct
  misc_feature 1..10: note = intronic recognition element for splicing modifier (REMS)
  source 1..10: mol_type = other DNA
aggagtrggt

SEQ ID NO: 2300 - DNA, 10 bp, synthetic construct
  misc_feature 1..10: note = intronic recognition element for splicing modifier (REMS)
  source 1..10: mol_type = other DNA
cggagtrggt

SEQ ID NO: 2301 - DNA, 10 bp, synthetic construct
  misc_feature 1..10: note = intronic recognition element for splicing modifier (REMS)
  source 1..10: mol_type = other DNA
gggagtrggt

SEQ ID NO: 2302 - DNA, 10 bp, synthetic construct
  misc_feature 1..10: note = intronic recognition element for splicing modifier (REMS)
  source 1..10: mol_type = other DNA
tggagtrggt

SEQ ID NO: 2303-2304 - skipped (2 entries)

SEQ ID NO: 2305 - DNA, 10 bp, synthetic construct
  misc_feature 1..10: note = intronic recognition element for splicing modifier (REMS)
  source 1..10: mol_type = other DNA
atgagtrggt

SEQ ID NO: 2306 - DNA, 10 bp, synthetic construct
  misc_feature 1..10: note = intronic recognition element for splicing modifier (REMS)
  source 1..10: mol_type = other DNA
ctgagtrggt

SEQ ID NO: 2307 - DNA, 10 bp, synthetic construct
  misc_feature 1..10: note = intronic recognition element for splicing modifier (REMS)
  source 1..10: mol_type = other DNA
gtgagtrggt

SEQ ID NO: 2308 - DNA, 10 bp, synthetic construct
  misc_feature 1..10: note = intronic recognition element for splicing modifier (REMS)
  source 1..10: mol_type = other DNA
ttgagtrggt

SEQ ID NO: 2309-2310 - skipped (2 entries)

SEQ ID NO: 2311 - DNA, 10 bp, synthetic construct
  misc_feature 1..10: note = intronic recognition element for splicing modifier (REMS)
  source 1..10: mol_type = other DNA
aagagtrtgt

SEQ ID NO: 2312 - DNA, 10 bp, synthetic construct
  misc_feature 1..10: note = intronic recognition element for splicing modifier (REMS)
  source 1..10: mol_type = other DNA
cagagtrtgt

SEQ ID NO: 2313 - DNA, 10 bp, synthetic construct
  misc_feature 1..10: note = intronic recognition element for splicing modifier (REMS)
  source 1..10: mol_type = other DNA
gagagtrtgt

SEQ ID NO: 2314 - DNA, 10 bp, synthetic construct
  misc_feature 1..10: note = intronic recognition element for splicing modifier (REMS)
  source 1..10: mol_type = other DNA
tagagtrtgt

SEQ ID NO: 2315-2316 - skipped (2 entries)

SEQ ID NO: 2317 - DNA, 10 bp, synthetic construct
  misc_feature 1..10: note = intronic recognition element for splicing modifier (REMS)
  source 1..10: mol_type = other DNA
acgagtrtgt

SEQ ID NO: 2318 - DNA, 10 bp, synthetic construct
  misc_feature 1..10: note = intronic recognition element for splicing modifier (REMS)
  source 1..10: mol_type = other DNA
ccgagtrtgt

SEQ ID NO: 2319 - DNA, 10 bp, synthetic construct
  misc_feature 1..10: note = intronic recognition element for splicing modifier (REMS)
  source 1..10: mol_type = other DNA
gcgagtrtgt

SEQ ID NO: 2320 - DNA, 10 bp, synthetic construct
  misc_feature 1..10: note = intronic recognition element for splicing modifier (REMS)
  source 1..10: mol_type = other DNA
tcgagtrtgt

SEQ ID NO: 2321-2322 - skipped (2 entries)

SEQ ID NO: 2323 - DNA, 10 bp, synthetic construct
  misc_feature 1..10: note = intronic recognition element for splicing modifier (REMS)
  source 1..10: mol_type = other DNA
aggagtrtgt

SEQ ID NO: 2324 - DNA, 10 bp, synthetic construct
  misc_feature 1..10: note = intronic recognition element for splicing modifier (REMS)
  source 1..10: mol_type = other DNA
cggagtrtgt

SEQ ID NO: 2325 - DNA, 10 bp, synthetic construct
  misc_feature 1..10: note = intronic recognition element for splicing modifier (REMS)
  source 1..10: mol_type = other DNA
gggagtrtgt

SEQ ID NO: 2326 - DNA, 10 bp, synthetic construct
  misc_feature 1..10: note = intronic recognition element for splicing modifier (REMS)
  source 1..10: mol_type = other DNA
tggagtrtgt

SEQ ID NO: 2327-2328 - skipped (2 entries)

SEQ ID NO: 2329 - DNA, 10 bp, synthetic construct
  misc_feature 1..10: note = intronic recognition element for splicing modifier (REMS)
  source 1..10: mol_type = other DNA
atgagtrtgt

SEQ ID NO: 2330 - DNA, 10 bp, synthetic construct
  misc_feature 1..10: note = intronic recognition element for splicing modifier (REMS)
  source 1..10: mol_type = other DNA
ctgagtrtgt

SEQ ID NO: 2331 - DNA, 10 bp, synthetic construct
  misc_feature 1..10: note = intronic recognition element for splicing modifier (REMS)
  source 1..10: mol_type = other DNA
gtgagtrtgt

SEQ ID NO: 2332 - DNA, 10 bp, synthetic construct
  misc_feature 1..10: note = intronic recognition element for splicing modifier (REMS)
  source 1..10: mol_type = other DNA
ttgagtrtgt

SEQ ID NO: 2333-2550 - skipped (218 entries)

SEQ ID NO: 2551 - DNA, 10 bp, synthetic construct
  misc_feature 1..10: note = intronic recognition element for splicing modifier (REMS)
  source 1..10: mol_type = other DNA
aagagtaaga

SEQ ID NO: 2552 - DNA, 10 bp, synthetic construct
  misc_feature 1..10: note = intronic recognition element for splicing modifier (REMS)
  source 1..10: mol_type = other DNA
cagagtaaga

SEQ ID NO: 2553 - DNA, 10 bp, synthetic construct
  misc_feature 1..10: note = intronic recognition element for splicing modifier (REMS)
  source 1..10: mol_type = other DNA
gagagtaaga

SEQ ID NO: 2554 - DNA, 10 bp, synthetic construct
  misc_feature 1..10: note = intronic recognition element for splicing modifier (REMS)
  source 1..10: mol_type = other DNA
tagagtaaga

SEQ ID NO: 2555-2556 - skipped (2 entries)

SEQ ID NO: 2557 - DNA, 10 bp, synthetic construct
  misc_feature 1..10: note = intronic recognition element for splicing modifier (REMS)
  source 1..10: mol_type = other DNA
acgagtaaga

SEQ ID NO: 2558 - DNA, 10 bp, synthetic construct
  misc_feature 1..10: note = intronic recognition element for splicing modifier (REMS)
  source 1..10: mol_type = other DNA
ccgagtaaga

SEQ ID NO: 2559 - DNA, 10 bp, synthetic construct
  misc_feature 1..10: note = intronic recognition element for splicing modifier (REMS)
  source 1..10: mol_type = other DNA
gcgagtaaga

SEQ ID NO: 2560 - DNA, 10 bp, synthetic construct
  misc_feature 1..10: note = intronic recognition element for splicing modifier (REMS)
  source 1..10: mol_type = other DNA
tcgagtaaga

SEQ ID NO: 2561-2562 - skipped (2 entries)

SEQ ID NO: 2563 - DNA, 10 bp, synthetic construct
  misc_feature 1..10: note = intronic recognition element for splicing modifier (REMS)
  source 1..10: mol_type = other DNA
aggagtaaga

SEQ ID NO: 2564 - DNA, 10 bp, synthetic construct
  misc_feature 1..10: note = intronic recognition element for splicing modifier (REMS)
  source 1..10: mol_type = other DNA
cggagtaaga

SEQ ID NO: 2565 - DNA, 10 bp, synthetic construct
  misc_feature 1..10: note = intronic recognition element for splicing modifier (REMS)
  source 1..10: mol_type = other DNA
gggagtaaga

SEQ ID NO: 2566 - DNA, 10 bp, synthetic construct
  misc_feature 1..10: note = intronic recognition element for splicing modifier (REMS)
  source 1..10: mol_type = other DNA
tggagtaaga

SEQ ID NO: 2567-2568 - skipped (2 entries)

SEQ ID NO: 2569 - DNA, 10 bp, synthetic construct
  misc_feature 1..10: note = intronic recognition element for splicing modifier (REMS)
  source 1..10: mol_type = other DNA
atgagtaaga

SEQ ID NO: 2570 - DNA, 10 bp, synthetic construct
  misc_feature 1..10: note = intronic recognition element for splicing modifier (REMS)
  source 1..10: mol_type = other DNA
ctgagtaaga

SEQ ID NO: 2571 - DNA, 10 bp, synthetic construct
  misc_feature 1..10: note = intronic recognition element for splicing modifier (REMS)
  source 1..10: mol_type = other DNA
gtgagtaaga

SEQ ID NO: 2572 - DNA, 10 bp, synthetic construct
  misc_feature 1..10: note = intronic recognition element for splicing modifier (REMS)
  source 1..10: mol_type = other DNA
ttgagtaaga

SEQ ID NO: 2573-2574 - skipped (2 entries)

SEQ ID NO: 2575 - DNA, 10 bp, synthetic construct
  misc_feature 1..10: note = intronic recognition element for splicing modifier (REMS)
  source 1..10: mol_type = other DNA
aagagtacga

SEQ ID NO: 2576 - DNA, 10 bp, synthetic construct
  misc_feature 1..10: note = intronic recognition element for splicing modifier (REMS)
  source 1..10: mol_type = other DNA
cagagtacga

SEQ ID NO: 2577 - DNA, 10 bp, synthetic construct
  misc_feature 1..10: note = intronic recognition element for splicing modifier (REMS)
  source 1..10: mol_type = other DNA
gagagtacga

SEQ ID NO: 2578 - DNA, 10 bp, synthetic construct
  misc_feature 1..10: note = intronic recognition element for splicing modifier (REMS)
  source 1..10: mol_type = other DNA
tagagtacga

SEQ ID NO: 2579-2580 - skipped (2 entries)

SEQ ID NO: 2581 - DNA, 10 bp, synthetic construct
  misc_feature 1..10: note = intronic recognition element for splicing modifier (REMS)
  source 1..10: mol_type = other DNA
acgagtacga

SEQ ID NO: 2582 - DNA, 10 bp, synthetic construct
  misc_feature 1..10: note = intronic recognition element for splicing modifier (REMS)
  source 1..10: mol_type = other DNA
ccgagtacga

SEQ ID NO: 2583 - DNA, 10 bp, synthetic construct
  misc_feature 1..10: note = intronic recognition element for splicing modifier (REMS)
  source 1..10: mol_type = other DNA
gcgagtacga

SEQ ID NO: 2584 - DNA, 10 bp, synthetic construct
  misc_feature 1..10: note = intronic recognition element for splicing modifier (REMS)
  source 1..10: mol_type = other DNA
tcgagtacga

SEQ ID NO: 2585-2586 - skipped (2 entries)

SEQ ID NO: 2587 - DNA, 10 bp, synthetic construct
  misc_feature 1..10: note = intronic recognition element for splicing modifier (REMS)
  source 1..10: mol_type = other DNA
aggagtacga

SEQ ID NO: 2588 - DNA, 10 bp, synthetic construct
  misc_feature 1..10: note = intronic recognition element for splicing modifier (REMS)
  source 1..10: mol_type = other DNA
cggagtacga

SEQ ID NO: 2589 - DNA, 10 bp, synthetic construct
  misc_feature 1..10: note = intronic recognition element for splicing modifier (REMS)
  source 1..10: mol_type = other DNA
gggagtacga

SEQ ID NO: 2590 - DNA, 10 bp, synthetic construct
  misc_feature 1..10: note = intronic recognition element for splicing modifier (REMS)
  source 1..10: mol_type = other DNA
tggagtacga

SEQ ID NO: 2591-2592 - skipped (2 entries)

SEQ ID NO: 2593 - DNA, 10 bp, synthetic construct
  misc_feature 1..10: note = intronic recognition element for splicing modifier (REMS)
  source 1..10: mol_type = other DNA
atgagtacga

SEQ ID NO: 2594 - DNA, 10 bp, synthetic construct
  misc_feature 1..10: note = intronic recognition element for splicing modifier (REMS)
  source 1..10: mol_type = other DNA
ctgagtacga

SEQ ID NO: 2595 - DNA, 10 bp, synthetic construct
  misc_feature 1..10: note = intronic recognition element for splicing modifier (REMS)
  source 1..10: mol_type = other DNA
gtgagtacga

SEQ ID NO: 2596 - DNA, 10 bp, synthetic construct
  misc_feature 1..10: note = intronic recognition element for splicing modifier (REMS)
  source 1..10: mol_type = other DNA
ttgagtacga

SEQ ID NO: 2597-2598 - skipped (2 entries)

SEQ ID NO: 2599 - DNA, 10 bp, synthetic construct
  misc_feature 1..10: note = intronic recognition element for splicing modifier (REMS)
  source 1..10: mol_type = other DNA
aagagtagga

SEQ ID NO: 2600 - DNA, 10 bp, synthetic construct
  misc_feature 1..10: note = intronic recognition element for splicing modifier (REMS)
  source 1..10: mol_type = other DNA
cagagtagga

SEQ ID NO: 2601 - DNA, 10 bp, synthetic construct
  misc_feature 1..10: note = intronic recognition element for splicing modifier (REMS)
  source 1..10: mol_type = other DNA
gagagtagga

SEQ ID NO: 2602 - DNA, 10 bp, synthetic construct
  misc_feature 1..10: note = intronic recognition element for splicing modifier (REMS)
  source 1..10: mol_type = other DNA
tagagtagga

SEQ ID NO: 2603-2604 - skipped (2 entries)

SEQ ID NO: 2605 - DNA, 10 bp, synthetic construct
  misc_feature 1..10: note = intronic recognition element for splicing modifier (REMS)
  source 1..10: mol_type = other DNA
acgagtagga

SEQ ID NO: 2606 - DNA, 10 bp, synthetic construct
  misc_feature 1..10: note = intronic recognition element for splicing modifier (REMS)
  source 1..10: mol_type = other DNA
ccgagtagga

SEQ ID NO: 2607 - DNA, 10 bp, synthetic construct
  misc_feature 1..10: note = intronic recognition element for splicing modifier (REMS)
  source 1..10: mol_type = other DNA
gcgagtagga

SEQ ID NO: 2608 - DNA, 10 bp, synthetic construct
  misc_feature 1..10: note = intronic recognition element for splicing modifier (REMS)
  source 1..10: mol_type = other DNA
tcgagtagga

SEQ ID NO: 2609-2610 - skipped (2 entries)

SEQ ID NO: 2611 - DNA, 10 bp, synthetic construct
  misc_feature 1..10: note = intronic recognition element for splicing modifier (REMS)
  source 1..10: mol_type = other DNA
aggagtagga

SEQ ID NO: 2612 - DNA, 10 bp, synthetic construct
  misc_feature 1..10: note = intronic recognition element for splicing modifier (REMS)
  source 1..10: mol_type = other DNA
cggagtagga

SEQ ID NO: 2613 - DNA, 10 bp, synthetic construct
  misc_feature 1..10: note = intronic recognition element for splicing modifier (REMS)
  source 1..10: mol_type = other DNA
gggagtagga

SEQ ID NO: 2614 - DNA, 10 bp, synthetic construct
  misc_feature 1..10: note = intronic recognition element for splicing modifier (REMS)
  source 1..10: mol_type = other DNA
tggagtagga

SEQ ID NO: 2615-2616 - skipped (2 entries)

SEQ ID NO: 2617 - DNA, 10 bp, synthetic construct
  misc_feature 1..10: note = intronic recognition element for splicing modifier (REMS)
  source 1..10: mol_type = other DNA
atgagtagga

SEQ ID NO: 2618 - DNA, 10 bp, synthetic construct
  misc_feature 1..10: note = intronic recognition element for splicing modifier (REMS)
  source 1..10: mol_type = other DNA
ctgagtagga

SEQ ID NO: 2619 - DNA, 10 bp, synthetic construct
  misc_feature 1..10: note = intronic recognition element for splicing modifier (REMS)
  source 1..10: mol_type = other DNA
gtgagtagga

SEQ ID NO: 2620 - DNA, 10 bp, synthetic construct
  misc_feature 1..10: note = intronic recognition element for splicing modifier (REMS)
  source 1..10: mol_type = other DNA
ttgagtagga

SEQ ID NO: 2621-2622 - skipped (2 entries)

SEQ ID NO: 2623 - DNA, 10 bp, synthetic construct
  misc_feature 1..10: note = intronic recognition element for splicing modifier (REMS)
  source 1..10: mol_type = other DNA
aagagtatga

SEQ ID NO: 2624 - DNA, 10 bp, synthetic construct
  misc_feature 1..10: note = intronic recognition element for splicing modifier (REMS)
  source 1..10: mol_type = other DNA
cagagtatga

SEQ ID NO: 2625 - DNA, 10 bp, synthetic construct
  misc_feature 1..10: note = intronic recognition element for splicing modifier (REMS)
  source 1..10: mol_type = other DNA
gagagtatga

SEQ ID NO: 2626 - DNA, 10 bp, synthetic construct
  misc_feature 1..10: note = intronic recognition element for splicing modifier (REMS)
  source 1..10: mol_type = other DNA
tagagtatga

SEQ ID NO: 2627-2628 - skipped (2 entries)

SEQ ID NO: 2629 - DNA, 10 bp, synthetic construct
  misc_feature 1..10: note = intronic recognition element for splicing modifier (REMS)
  source 1..10: mol_type = other DNA
acgagtatga

SEQ ID NO: 2630 - DNA, 10 bp, synthetic construct
  misc_feature 1..10: note = intronic recognition element for splicing modifier (REMS)
  source 1..10: mol_type = other DNA
ccgagtatga

SEQ ID NO: 2631 - DNA, 10 bp, synthetic construct
  misc_feature 1..10: note = intronic recognition element for splicing modifier (REMS)
  source 1..10: mol_type = other DNA
gcgagtatga

SEQ ID NO: 2632 - DNA, 10 bp, synthetic construct
  misc_feature 1..10: note = intronic recognition element for splicing modifier (REMS)
  source 1..10: mol_type = other DNA
tcgagtatga

SEQ ID NO: 2633-2634 - skipped (2 entries)

SEQ ID NO: 2635 - DNA, 10 bp, synthetic construct
  misc_feature 1..10: note = intronic recognition element for splicing modifier (REMS)
  source 1..10: mol_type = other DNA
aggagtatga

SEQ ID NO: 2636 - DNA, 10 bp, synthetic construct
  misc_feature 1..10: note = intronic recognition element for splicing modifier (REMS)
  source 1..10: mol_type = other DNA
cggagtatga

SEQ ID NO: 2637 - DNA, 10 bp, synthetic construct
  misc_feature 1..10: note = intronic recognition element for splicing modifier (REMS)
  source 1..10: mol_type = other DNA
gggagtatga

SEQ ID NO: 2638 - DNA, 10 bp, synthetic construct
  misc_feature 1..10: note = intronic recognition element for splicing modifier (REMS)
  source 1..10: mol_type = other DNA
tggagtatga

SEQ ID NO: 2639-2640 - skipped (2 entries)

SEQ ID NO: 2641 - DNA, 10 bp, synthetic construct
  misc_feature 1..10: note = intronic recognition element for splicing modifier (REMS)
  source 1..10: mol_type = other DNA
atgagtatga

SEQ ID NO: 2642 - DNA, 10 bp, synthetic construct
  misc_feature 1..10: note = intronic recognition element for splicing modifier (REMS)
  source 1..10: mol_type = other DNA
ctgagtatga

SEQ ID NO: 2643 - DNA, 10 bp, synthetic construct
  misc_feature 1..10: note = intronic recognition element for splicing modifier (REMS)
  source 1..10: mol_type = other DNA
gtgagtatga

SEQ ID NO: 2644 - DNA, 10 bp, synthetic construct
  misc_feature 1..10: note = intronic recognition element for splicing modifier (REMS)
  source 1..10: mol_type = other DNA
ttgagtatga

SEQ ID NO: 2645-2646 - skipped (2 entries)

SEQ ID NO: 2647 - DNA, 10 bp, synthetic construct
  misc_feature 1..10: note = intronic recognition element for splicing modifier (REMS)
  source 1..10: mol_type = other DNA
aagagtaagc

SEQ ID NO: 2648 - DNA, 10 bp, synthetic construct
  misc_feature 1..10: note = intronic recognition element for splicing modifier (REMS)
  source 1..10: mol_type = other DNA
cagagtaagc

SEQ ID NO: 2649 - DNA, 10 bp, synthetic construct
  misc_feature 1..10: note = intronic recognition element for splicing modifier (REMS)
  source 1..10: mol_type = other DNA
gagagtaagc

SEQ ID NO: 2650 - DNA, 10 bp, synthetic construct
  misc_feature 1..10: note = intronic recognition element for splicing modifier (REMS)
  source 1..10: mol_type = other DNA
tagagtaagc

SEQ ID NO: 2651-2652 - skipped (2 entries)

SEQ ID NO: 2653 - DNA, 10 bp, synthetic construct
  misc_feature 1..10: note = intronic recognition element for splicing modifier (REMS)
  source 1..10: mol_type = other DNA
acgagtaagc

SEQ ID NO: 2654 - DNA, 10 bp, synthetic construct
  misc_feature 1..10: note = intronic recognition element for splicing modifier (REMS)
  source 1..10: mol_type = other DNA
ccgagtaagc

SEQ ID NO: 2655 - DNA, 10 bp, synthetic construct
  misc_feature 1..10: note = intronic recognition element for splicing modifier (REMS)
  source 1..10: mol_type = other DNA
gcgagtaagc

SEQ ID NO: 2656 - DNA, 10 bp, synthetic construct
  misc_feature 1..10: note = intronic recognition element for splicing modifier (REMS)
  source 1..10: mol_type = other DNA
tcgagtaagc

SEQ ID NO: 2657-2658 - skipped (2 entries)

SEQ ID NO: 2659 - DNA, 10 bp, synthetic construct
  misc_feature 1..10: note = intronic recognition element for splicing modifier (REMS)
  source 1..10: mol_type = other DNA
aggagtaagc

SEQ ID NO: 2660 - DNA, 10 bp, synthetic construct
  misc_feature 1..10: note = intronic recognition element for splicing modifier (REMS)
  source 1..10: mol_type = other DNA
cggagtaagc

SEQ ID NO: 2661 - DNA, 10 bp, synthetic construct
  misc_feature 1..10: note = intronic recognition element for splicing modifier (REMS)
  source 1..10: mol_type = other DNA
gggagtaagc

SEQ ID NO: 2662 - DNA, 10 bp, synthetic construct
  misc_feature 1..10: note = intronic recognition element for splicing modifier (REMS)
  source 1..10: mol_type = other DNA
tggagtaagc

SEQ ID NO: 2663-2664 - skipped (2 entries)

SEQ ID NO: 2665 - DNA, 10 bp, synthetic construct
  misc_feature 1..10: note = intronic recognition element for splicing modifier (REMS)
  source 1..10: mol_type = other DNA
atgagtaagc

SEQ ID NO: 2666 - DNA, 10 bp, synthetic construct
  misc_feature 1..10: note = intronic recognition element for splicing modifier (REMS)
  source 1..10: mol_type = other DNA
ctgagtaagc

SEQ ID NO: 2667 - DNA, 10 bp, synthetic construct
  misc_feature 1..10: note = intronic recognition element for splicing modifier (REMS)
  source 1..10: mol_type = other DNA
gtgagtaagc

SEQ ID NO: 2668 - DNA, 10 bp, synthetic construct
  misc_feature 1..10: note = intronic recognition element for splicing modifier (REMS)
  source 1..10: mol_type = other DNA
ttgagtaagc

SEQ ID NO: 2669-2670 - skipped (2 entries)

SEQ ID NO: 2671 - DNA, 10 bp, synthetic construct
  misc_feature 1..10: note = intronic recognition element for splicing modifier (REMS)
  source 1..10: mol_type = other DNA
aagagtacgc

SEQ ID NO: 2672 - DNA, 10 bp, synthetic construct
  misc_feature 1..10: note = intronic recognition element for splicing modifier (REMS)
  source 1..10: mol_type = other DNA
cagagtacgc

SEQ ID NO: 2673 - DNA, 10 bp, synthetic construct
  misc_feature 1..10: note = intronic recognition element for splicing modifier (REMS)
  source 1..10: mol_type = other DNA
gagagtacgc

SEQ ID NO: 2674 - DNA, 10 bp, synthetic construct
  misc_feature 1..10: note = intronic recognition element for splicing modifier (REMS)
  source 1..10: mol_type = other DNA
tagagtacgc

SEQ ID NO: 2675-2676 - skipped (2 entries)

SEQ ID NO: 2677 - DNA, 10 bp, synthetic construct
  misc_feature 1..10: note = intronic recognition element for splicing modifier (REMS)
  source 1..10: mol_type = other DNA
acgagtacgc

SEQ ID NO: 2678 - DNA, 10 bp, synthetic construct
  misc_feature 1..10: note = intronic recognition element for splicing modifier (REMS)
  source 1..10: mol_type = other DNA
ccgagtacgc

SEQ ID NO: 2679 - DNA, 10 bp, synthetic construct
  misc_feature 1..10: note = intronic recognition element for splicing modifier (REMS)
  source 1..10: mol_type = other DNA
gcgagtacgc

SEQ ID NO: 2680 - DNA, 10 bp, synthetic construct
  misc_feature 1..10: note = intronic recognition element for splicing modifier (REMS)
  source 1..10: mol_type = other DNA
tcgagtacgc

SEQ ID NO: 2681-2682 - skipped (2 entries)

SEQ ID NO: 2683 - DNA, 10 bp, synthetic construct
  misc_feature 1..10: note = intronic recognition element for splicing modifier (REMS)
  source 1..10: mol_type = other DNA
aggagtacgc

SEQ ID NO: 2684 - DNA, 10 bp, synthetic construct
  misc_feature 1..10: note = intronic recognition element for splicing modifier (REMS)
  source 1..10: mol_type = other DNA
cggagtacgc

SEQ ID NO: 2685 - DNA, 10 bp, synthetic construct
  misc_feature 1..10: note = intronic recognition element for splicing modifier (REMS)
  source 1..10: mol_type = other DNA
gggagtacgc

SEQ ID NO: 2686 - DNA, 10 bp, synthetic construct
  misc_feature 1..10: note = intronic recognition element for splicing modifier (REMS)
  source 1..10: mol_type = other DNA
tggagtacgc

SEQ ID NO: 2687-2688 - skipped (2 entries)

SEQ ID NO: 2689 - DNA, 10 bp, synthetic construct
  misc_feature 1..10: note = intronic recognition element for splicing modifier (REMS)
  source 1..10: mol_type = other DNA
atgagtacgc

SEQ ID NO: 2690 - DNA, 10 bp, synthetic construct
  misc_feature 1..10: note = intronic recognition element for splicing modifier (REMS)
  source 1..10: mol_type = other DNA
ctgagtacgc

SEQ ID NO: 2691 - DNA, 10 bp, synthetic construct
  misc_feature 1..10: note = intronic recognition element for splicing modifier (REMS)
  source 1..10: mol_type = other DNA
gtgagtacgc

SEQ ID NO: 2692 - DNA, 10 bp, synthetic construct
  misc_feature 1..10: note = intronic recognition element for splicing modifier (REMS)
  source 1..10: mol_type = other DNA
ttgagtacgc

SEQ ID NO: 2693-2694 - skipped (2 entries)

SEQ ID NO: 2695 - DNA, 10 bp, synthetic construct
  misc_feature 1..10: note = intronic recognition element for splicing modifier (REMS)
  source 1..10: mol_type = other DNA
aagagtaggc

SEQ ID NO: 2696 - DNA, 10 bp, synthetic construct
  misc_feature 1..10: note = intronic recognition element for splicing modifier (REMS)
  source 1..10: mol_type = other DNA
cagagtaggc

SEQ ID NO: 2697 - DNA, 10 bp, synthetic construct
  misc_feature 1..10: note = intronic recognition element for splicing modifier (REMS)
  source 1..10: mol_type = other DNA
gagagtaggc

SEQ ID NO: 2698 - DNA, 10 bp, synthetic construct
  misc_feature 1..10: note = intronic recognition element for splicing modifier (REMS)
  source 1..10: mol_type = other DNA
tagagtaggc

SEQ ID NO: 2699-2700 - skipped (2 entries)

SEQ ID NO: 2701 - DNA, 10 bp, synthetic construct
  misc_feature 1..10: note = intronic recognition element for splicing modifier (REMS)
  source 1..10: mol_type = other DNA
acgagtaggc

SEQ ID NO: 2702 - DNA, 10 bp, synthetic construct
  misc_feature 1..10: note = intronic recognition element for splicing modifier (REMS)
  source 1..10: mol_type = other DNA
ccgagtaggc

SEQ ID NO: 2703 - DNA, 10 bp, synthetic construct
  misc_feature 1..10: note = intronic recognition element for splicing modifier (REMS)
  source 1..10: mol_type = other DNA
gcgagtaggc

SEQ ID NO: 2704 - DNA, 10 bp, synthetic construct
  misc_feature 1..10: note = intronic recognition element for splicing modifier (REMS)
  source 1..10: mol_type = other DNA
tcgagtaggc

SEQ ID NO: 2705-2706 - skipped (2 entries)

SEQ ID NO: 2707 - DNA, 10 bp, synthetic construct
  misc_feature 1..10: note = intronic recognition element for splicing modifier (REMS)
  source 1..10: mol_type = other DNA
aggagtaggc

SEQ ID NO: 2708 - DNA, 10 bp, synthetic construct
  misc_feature 1..10: note = intronic recognition element for splicing modifier (REMS)
  source 1..10: mol_type = other DNA
cggagtaggc

SEQ ID NO: 2709 - DNA, 10 bp, synthetic construct
  misc_feature 1..10: note = intronic recognition element for splicing modifier (REMS)
  source 1..10: mol_type = other DNA
gggagtaggc

SEQ ID NO: 2710 - DNA, 10 bp, synthetic construct
  misc_feature 1..10: note = intronic recognition element for splicing modifier (REMS)
  source 1..10: mol_type = other DNA
tggagtaggc

SEQ ID NO: 2711-2712 - skipped (2 entries)

SEQ ID NO: 2713 - DNA, 10 bp, synthetic construct
  misc_feature 1..10: note = intronic recognition element for splicing modifier (REMS)
  source 1..10: mol_type = other DNA
atgagtaggc

SEQ ID NO: 2714 - DNA, 10 bp, synthetic construct
  misc_feature 1..10: note = intronic recognition element for splicing modifier (REMS)
  source 1..10: mol_type = other DNA
ctgagtaggc

SEQ ID NO: 2715 - DNA, 10 bp, synthetic construct
  misc_feature 1..10: note = intronic recognition element for splicing modifier (REMS)
  source 1..10: mol_type = other DNA
gtgagtaggc

SEQ ID NO: 2716 - DNA, 10 bp, synthetic construct
  misc_feature 1..10: note = intronic recognition element for splicing modifier (REMS)
  source 1..10: mol_type = other DNA
ttgagtaggc

SEQ ID NO: 2717-2718 - skipped (2 entries)

SEQ ID NO: 2719 - DNA, 10 bp, synthetic construct
  misc_feature 1..10: note = intronic recognition element for splicing modifier (REMS)
  source 1..10: mol_type = other DNA
aagagtatgc

SEQ ID NO: 2720 - DNA, 10 bp, synthetic construct
  misc_feature 1..10: note = intronic recognition element for splicing modifier (REMS)
  source 1..10: mol_type = other DNA
cagagtatgc

SEQ ID NO: 2721 - DNA, 10 bp, synthetic construct
  misc_feature 1..10: note = intronic recognition element for splicing modifier (REMS)
  source 1..10: mol_type = other DNA
gagagtatgc

SEQ ID NO: 2722 - DNA, 10 bp, synthetic construct
  misc_feature 1..10: note = intronic recognition element for splicing modifier (REMS)
  source 1..10: mol_type = other DNA
tagagtatgc

SEQ ID NO: 2723-2724 - skipped (2 entries)

SEQ ID NO: 2725 - DNA, 10 bp, synthetic construct
  misc_feature 1..10: note = intronic recognition element for splicing modifier (REMS)
  source 1..10: mol_type = other DNA
acgagtatgc

SEQ ID NO: 2726 - DNA, 10 bp, synthetic construct
  misc_feature 1..10: note = intronic recognition element for splicing modifier (REMS)
  source 1..10: mol_type = other DNA
ccgagtatgc

SEQ ID NO: 2727 - DNA, 10 bp, synthetic construct
  misc_feature 1..10: note = intronic recognition element for splicing modifier (REMS)
  source 1..10: mol_type = other DNA
gcgagtatgc

SEQ ID NO: 2728 - DNA, 10 bp, synthetic construct
  misc_feature 1..10: note = intronic recognition element for splicing modifier (REMS)
  source 1..10: mol_type = other DNA
tcgagtatgc

SEQ ID NO: 2729-2730 - skipped (2 entries)

SEQ ID NO: 2731 - DNA, 10 bp, synthetic construct
  misc_feature 1..10: note = intronic recognition element for splicing modifier (REMS)
  source 1..10: mol_type = other DNA
aggagtatgc

SEQ ID NO: 2732 - DNA, 10 bp, synthetic construct
  misc_feature 1..10: note = intronic recognition element for splicing modifier (REMS)
  source 1..10: mol_type = other DNA
cggagtatgc

SEQ ID NO: 2733 - DNA, 10 bp, synthetic construct
  misc_feature 1..10: note = intronic recognition element for splicing modifier (REMS)
  source 1..10: mol_type = other DNA
gggagtatgc

SEQ ID NO: 2734 - DNA, 10 bp, synthetic construct
  misc_feature 1..10: note = intronic recognition element for splicing modifier (REMS)
  source 1..10: mol_type = other DNA
tggagtatgc

SEQ ID NO: 2735-2736 - skipped (2 entries)

SEQ ID NO: 2737 - DNA, 10 bp, synthetic construct
  misc_feature 1..10: note = intronic recognition element for splicing modifier (REMS)
  source 1..10: mol_type = other DNA
atgagtatgc

SEQ ID NO: 2738 - DNA, 10 bp, synthetic construct
  misc_feature 1..10: note = intronic recognition element for splicing modifier (REMS)
  source 1..10: mol_type = other DNA
ctgagtatgc

SEQ ID NO: 2739 - DNA, 10 bp, synthetic construct
  misc_feature 1..10: note = intronic recognition element for splicing modifier (REMS)
  source 1..10: mol_type = other DNA
gtgagtatgc

SEQ ID NO: 2740 - DNA, 10 bp, synthetic construct
  misc_feature 1..10: note = intronic recognition element for splicing modifier (REMS)
  source 1..10: mol_type = other DNA
ttgagtatgc

SEQ ID NO: 2741-2742 - skipped (2 entries)

SEQ ID NO: 2743 - DNA, 10 bp, synthetic construct
  misc_feature 1..10: note = intronic recognition element for splicing modifier (REMS)
  source 1..10: mol_type = other DNA
aagagtaagg

SEQ ID NO: 2744 - DNA, 10 bp, synthetic construct
  misc_feature 1..10: note = intronic recognition element for splicing modifier (REMS)
  source 1..10: mol_type = other DNA
cagagtaagg

SEQ ID NO: 2745 - DNA, 10 bp, synthetic construct
  misc_feature 1..10: note = intronic recognition element for splicing modifier (REMS)
  source 1..10: mol_type = other DNA
gagagtaagg

SEQ ID NO: 2746 - DNA, 10 bp, synthetic construct
  misc_feature 1..10: note = intronic recognition element for splicing modifier (REMS)
  source 1..10: mol_type = other DNA
tagagtaagg

SEQ ID NO: 2747-2748 - skipped (2 entries)

SEQ ID NO: 2749 - DNA, 10 bp, synthetic construct
  misc_feature 1..10: note = intronic recognition element for splicing modifier (REMS)
  source 1..10: mol_type = other DNA
acgagtaagg

SEQ ID NO: 2750 - DNA, 10 bp, synthetic construct
  misc_feature 1..10: note = intronic recognition element for splicing modifier (REMS)
  source 1..10: mol_type = other DNA
ccgagtaagg

SEQ ID NO: 2751 - DNA, 10 bp, synthetic construct
  misc_feature 1..10: note = intronic recognition element for splicing modifier (REMS)
  source 1..10: mol_type = other DNA
gcgagtaagg

SEQ ID NO: 2752 - DNA, 10 bp, synthetic construct
  misc_feature 1..10: note = intronic recognition element for splicing modifier (REMS)
  source 1..10: mol_type = other DNA
tcgagtaagg

SEQ ID NO: 2753-2754 - skipped (2 entries)

SEQ ID NO: 2755 - DNA, 10 bp, synthetic construct
  misc_feature 1..10: note = intronic recognition element for splicing modifier (REMS)
  source 1..10: mol_type = other DNA
aggagtaagg

SEQ ID NO: 2756 - DNA, 10 bp, synthetic construct
  misc_feature 1..10: note = intronic recognition element for splicing modifier (REMS)
  source 1..10: mol_type = other DNA
cggagtaagg

SEQ ID NO: 2757 - DNA, 10 bp, synthetic construct
  misc_feature 1..10: note = intronic recognition element for splicing modifier (REMS)
  source 1..10: mol_type = other DNA
gggagtaagg

SEQ ID NO: 2758 - DNA, 10 bp, synthetic construct
  misc_feature 1..10: note = intronic recognition element for splicing modifier (REMS)
  source 1..10: mol_type = other DNA
tggagtaagg

SEQ ID NO: 2759-2760 - skipped (2 entries)

SEQ ID NO: 2761 - DNA, 10 bp, synthetic construct
  misc_feature 1..10: note = intronic recognition element for splicing modifier (REMS)
  source 1..10: mol_type = other DNA
atgagtaagg

SEQ ID NO: 2762 - DNA, 10 bp, synthetic construct
  misc_feature 1..10: note = intronic recognition element for splicing modifier (REMS)
  source 1..10: mol_type = other DNA
ctgagtaagg

SEQ ID NO: 2763 - DNA, 10 bp, synthetic construct
  misc_feature 1..10: note = intronic recognition element for splicing modifier (REMS)
  source 1..10: mol_type = other DNA
gtgagtaagg

SEQ ID NO: 2764 - DNA, 10 bp, synthetic construct
  misc_feature 1..10: note = intronic recognition element for splicing modifier (REMS)
  source 1..10: mol_type = other DNA
ttgagtaagg

SEQ ID NO: 2765-2766 - skipped (2 entries)

SEQ ID NO: 2767 - DNA, 10 bp, synthetic construct
  misc_feature 1..10: note = intronic recognition element for splicing modifier (REMS)
  source 1..10: mol_type = other DNA
aagagtacgg

SEQ ID NO: 2768 - DNA, 10 bp, synthetic construct
  misc_feature 1..10: note = intronic recognition element for splicing modifier (REMS)
  source 1..10: mol_type = other DNA
cagagtacgg

SEQ ID NO: 2769 - DNA, 10 bp, synthetic construct
  misc_feature 1..10: note = intronic recognition element for splicing modifier (REMS)
  source 1..10: mol_type = other DNA
gagagtacgg

SEQ ID NO: 2770 - DNA, 10 bp, synthetic construct
  misc_feature 1..10: note = intronic recognition element for splicing modifier (REMS)
  source 1..10: mol_type = other DNA
tagagtacgg

SEQ ID NO: 2771-2772 - skipped (2 entries)

SEQ ID NO: 2773 - DNA, 10 bp, synthetic construct
  misc_feature 1..10: note = intronic recognition element for splicing modifier (REMS)
  source 1..10: mol_type = other DNA
acgagtacgg

SEQ ID NO: 2774 - DNA, 10 bp, synthetic construct
  misc_feature 1..10: note = intronic recognition element for splicing modifier (REMS)
  source 1..10: mol_type = other DNA
ccgagtacgg

SEQ ID NO: 2775 - DNA, 10 bp, synthetic construct
  misc_feature 1..10: note = intronic recognition element for splicing modifier (REMS)
  source 1..10: mol_type = other DNA
gcgagtacgg

SEQ ID NO: 2776 - DNA, 10 bp, synthetic construct
  misc_feature 1..10: note = intronic recognition element for splicing modifier (REMS)
  source 1..10: mol_type = other DNA
tcgagtacgg

SEQ ID NO: 2777-2778 - skipped (2 entries)

SEQ ID NO: 2779 - DNA, 10 bp, synthetic construct
  misc_feature 1..10: note = intronic recognition element for splicing modifier (REMS)
  source 1..10: mol_type = other DNA
aggagtacgg

SEQ ID NO: 2780 - DNA, 10 bp, synthetic construct
  misc_feature 1..10: note = intronic recognition element for splicing modifier (REMS)
  source 1..10: mol_type = other DNA
cggagtacgg

SEQ ID NO: 2781 - DNA, 10 bp, synthetic construct
  misc_feature 1..10: note = intronic recognition element for splicing modifier (REMS)
  source 1..10: mol_type = other DNA
gggagtacgg

SEQ ID NO: 2782 - DNA, 10 bp, synthetic construct
  misc_feature 1..10: note = intronic recognition element for splicing modifier (REMS)
  source 1..10: mol_type = other DNA
tggagtacgg

SEQ ID NO: 2783-2784 - skipped (2 entries)

SEQ ID NO: 2785 - DNA, 10 bp, synthetic construct
  misc_feature 1..10: note = intronic recognition element for splicing modifier (REMS)
  source 1..10: mol_type = other DNA
atgagtacgg

SEQ ID NO: 2786 - DNA, 10 bp, synthetic construct
  misc_feature 1..10: note = intronic recognition element for splicing modifier (REMS)
  source 1..10: mol_type = other DNA
ctgagtacgg

SEQ ID NO: 2787 - DNA, 10 bp, synthetic construct
  misc_feature 1..10: note = intronic recognition element for splicing modifier (REMS)
  source 1..10: mol_type = other DNA
gtgagtacgg

SEQ ID NO: 2788 - DNA, 10 bp, synthetic construct
  misc_feature 1..10: note = intronic recognition element for splicing modifier (REMS)
  source 1..10: mol_type = other DNA
ttgagtacgg

SEQ ID NO: 2789-2790 - skipped (2 entries)

SEQ ID NO: 2791 - DNA, 10 bp, synthetic construct
  misc_feature 1..10: note = intronic recognition element for splicing modifier (REMS)
  source 1..10: mol_type = other DNA
aagagtaggg

SEQ ID NO: 2792 - DNA, 10 bp, synthetic construct
  misc_feature 1..10: note = intronic recognition element for splicing modifier (REMS)
  source 1..10: mol_type = other DNA
cagagtaggg

SEQ ID NO: 2793 - DNA, 10 bp, synthetic construct
  misc_feature 1..10: note = intronic recognition element for splicing modifier (REMS)
  source 1..10: mol_type = other DNA
gagagtaggg

SEQ ID NO: 2794 - DNA, 10 bp, synthetic construct
  misc_feature 1..10: note = intronic recognition element for splicing modifier (REMS)
  source 1..10: mol_type = other DNA
tagagtaggg

SEQ ID NO: 2795-2796 - skipped (2 entries)

SEQ ID NO: 2797 - DNA, 10 bp, synthetic construct
  misc_feature 1..10: note = intronic recognition element for splicing modifier (REMS)
  source 1..10: mol_type = other DNA
acgagtaggg

SEQ ID NO: 2798 - DNA, 10 bp, synthetic construct
  misc_feature 1..10: note = intronic recognition element for splicing modifier (REMS)
  source 1..10: mol_type = other DNA
ccgagtaggg

SEQ ID NO: 2799 - DNA, 10 bp, synthetic construct
  misc_feature 1..10: note = intronic recognition element for splicing modifier (REMS)
  source 1..10: mol_type = other DNA
gcgagtaggg

SEQ ID NO: 2800 - DNA, 10 bp, synthetic construct
  misc_feature 1..10: note = intronic recognition element for splicing modifier (REMS)
  source 1..10: mol_type = other DNA
tcgagtaggg

SEQ ID NO: 2801-2802 - skipped (2 entries)

SEQ ID NO: 2803 - DNA, 10 bp, synthetic construct
  misc_feature 1..10: note = intronic recognition element for splicing modifier (REMS)
  source 1..10: mol_type = other DNA
aggagtaggg

SEQ ID NO: 2804 - DNA, 10 bp, synthetic construct
  misc_feature 1..10: note = intronic recognition element for splicing modifier (REMS)
  source 1..10: mol_type = other DNA
cggagtaggg

SEQ ID NO: 2805 - DNA, 10 bp, synthetic construct
  misc_feature 1..10: note = intronic recognition element for splicing modifier (REMS)
  source 1..10: mol_type = other DNA
gggagtaggg

SEQ ID NO: 2806 - DNA, 10 bp, synthetic construct
  misc_feature 1..10: note = intronic recognition element for splicing modifier (REMS)
  source 1..10: mol_type = other DNA
tggagtaggg

SEQ ID NO: 2807-2808 - skipped (2 entries)

SEQ ID NO: 2809 - DNA, 10 bp, synthetic construct
  misc_feature 1..10: note = intronic recognition element for splicing modifier (REMS)
  source 1..10: mol_type = other DNA
atgagtaggg

SEQ ID NO: 2810 - DNA, 10 bp, synthetic construct
  misc_feature 1..10: note = intronic recognition element for splicing modifier (REMS)
  source 1..10: mol_type = other DNA
ctgagtaggg

SEQ ID NO: 2811 - DNA, 10 bp, synthetic construct
  misc_feature 1..10: note = intronic recognition element for splicing modifier (REMS)
  source 1..10: mol_type = other DNA
gtgagtaggg

SEQ ID NO: 2812 - DNA, 10 bp, synthetic construct
  misc_feature 1..10: note = intronic recognition element for splicing modifier (REMS)
  source 1..10: mol_type = other DNA
ttgagtaggg

SEQ ID NO: 2813-2814 - skipped (2 entries)

SEQ ID NO: 2815 - DNA, 10 bp, synthetic construct
  misc_feature 1..10: note = intronic recognition element for splicing modifier (REMS)
  source 1..10: mol_type = other DNA
aagagtatgg

SEQ ID NO: 2816 - DNA, 10 bp, synthetic construct
  misc_feature 1..10: note = intronic recognition element for splicing modifier (REMS)
  source 1..10: mol_type = other DNA
cagagtatgg

SEQ ID NO: 2817 - DNA, 10 bp, synthetic construct
  misc_feature 1..10: note = intronic recognition element for splicing modifier (REMS)
  source 1..10: mol_type = other DNA
gagagtatgg

SEQ ID NO: 2818 - DNA, 10 bp, synthetic construct
  misc_feature 1..10: note = intronic recognition element for splicing modifier (REMS)
  source 1..10: mol_type = other DNA
tagagtatgg

SEQ ID NO: 2819-2820 - skipped (2 entries)

SEQ ID NO: 2821 - DNA, 10 bp, synthetic construct
  misc_feature 1..10: note = intronic recognition element for splicing modifier (REMS)
  source 1..10: mol_type = other DNA
acgagtatgg

SEQ ID NO: 2822 - DNA, 10 bp, synthetic construct
  misc_feature 1..10: note = intronic recognition element for splicing modifier (REMS)
  source 1..10: mol_type = other DNA
ccgagtatgg

SEQ ID NO: 2823 - DNA, 10 bp, synthetic construct
  misc_feature 1..10: note = intronic recognition element for splicing modifier (REMS)
  source 1..10: mol_type = other DNA
gcgagtatgg

SEQ ID NO: 2824 - DNA, 10 bp, synthetic construct
  misc_feature 1..10: note = intronic recognition element for splicing modifier (REMS)
  source 1..10: mol_type = other DNA
tcgagtatgg

SEQ ID NO: 2825-2826 - skipped (2 entries)

SEQ ID NO: 2827 - DNA, 10 bp, synthetic construct
  misc_feature 1..10: note = intronic recognition element for splicing modifier (REMS)
  source 1..10: mol_type = other DNA
aggagtatgg

SEQ ID NO: 2828 - DNA, 10 bp, synthetic construct
  misc_feature 1..10: note = intronic recognition element for splicing modifier (REMS)
  source 1..10: mol_type = other DNA
cggagtatgg

SEQ ID NO: 2829 - DNA, 10 bp, synthetic construct
  misc_feature 1..10: note = intronic recognition element for splicing modifier (REMS)
  source 1..10: mol_type = other DNA
gggagtatgg

SEQ ID NO: 2830 - DNA, 10 bp, synthetic construct
  misc_feature 1..10: note = intronic recognition element for splicing modifier (REMS)
  source 1..10: mol_type = other DNA
tggagtatgg

SEQ ID NO: 2831-2832 - skipped (2 entries)

SEQ ID NO: 2833 - DNA, 10 bp, synthetic construct
  misc_feature 1..10: note = intronic recognition element for splicing modifier (REMS)
  source 1..10: mol_type = other DNA
atgagtatgg

SEQ ID NO: 2834 - DNA, 10 bp, synthetic construct
  misc_feature 1..10: note = intronic recognition element for splicing modifier (REMS)
  source 1..10: mol_type = other DNA
ctgagtatgg

SEQ ID NO: 2835 - DNA, 10 bp, synthetic construct
  misc_feature 1..10: note = intronic recognition element for splicing modifier (REMS)
  source 1..10: mol_type = other DNA
gtgagtatgg

SEQ ID NO: 2836 - DNA, 10 bp, synthetic construct
  misc_feature 1..10: note = intronic recognition element for splicing modifier (REMS)
  source 1..10: mol_type = other DNA
ttgagtatgg

SEQ ID NO: 2837-2838 - skipped (2 entries)

SEQ ID NO: 2839 - DNA, 10 bp, synthetic construct
  misc_feature 1..10: note = intronic recognition element for splicing modifier (REMS)
  source 1..10: mol_type = other DNA
aagagtaagt

SEQ ID NO: 2840 - DNA, 10 bp, synthetic construct
  misc_feature 1..10: note = intronic recognition element for splicing modifier (REMS)
  source 1..10: mol_type = other DNA
cagagtaagt

SEQ ID NO: 2841 - DNA, 10 bp, synthetic construct
  misc_feature 1..10: note = intronic recognition element for splicing modifier (REMS)
  source 1..10: mol_type = other DNA
gagagtaagt

SEQ ID NO: 2842 - DNA, 10 bp, synthetic construct
  misc_feature 1..10: note = intronic recognition element for splicing modifier (REMS)
  source 1..10: mol_type = other DNA
tagagtaagt

SEQ ID NO: 2843-2844 - skipped (2 entries)

SEQ ID NO: 2845 - DNA, 10 bp, synthetic construct
  misc_feature 1..10: note = intronic recognition element for splicing modifier (REMS)
  source 1..10: mol_type = other DNA
acgagtaagt

SEQ ID NO: 2846 - DNA, 10 bp, synthetic construct
  misc_feature 1..10: note = intronic recognition element for splicing modifier (REMS)
  source 1..10: mol_type = other DNA
ccgagtaagt

SEQ ID NO: 2847 - DNA, 10 bp, synthetic construct
  misc_feature 1..10: note = intronic recognition element for splicing modifier (REMS)
  source 1..10: mol_type = other DNA
gcgagtaagt

SEQ ID NO: 2848 - DNA, 10 bp, synthetic construct
  misc_feature 1..10: note = intronic recognition element for splicing modifier (REMS)
  source 1..10: mol_type = other DNA
tcgagtaagt

SEQ ID NO: 2849-2850 - skipped (2 entries)

SEQ ID NO: 2851 - DNA, 10 bp, synthetic construct
  misc_feature 1..10: note = intronic recognition element for splicing modifier (REMS)
  source 1..10: mol_type = other DNA
aggagtaagt

SEQ ID NO: 2852 - DNA, 10 bp, synthetic construct
  misc_feature 1..10: note = intronic recognition element for splicing modifier (REMS)
  source 1..10: mol_type = other DNA
cggagtaagt

SEQ ID NO: 2853 - DNA, 10 bp, synthetic construct
  misc_feature 1..10: note = intronic recognition element for splicing modifier (REMS)
  source 1..10: mol_type = other DNA
gggagtaagt

SEQ ID NO: 2854 - DNA, 10 bp, synthetic construct
  misc_feature 1..10: note = intronic recognition element for splicing modifier (REMS)
  source 1..10: mol_type = other DNA
tggagtaagt

SEQ ID NO: 2855-2856 - skipped (2 entries)

SEQ ID NO: 2857 - DNA, 10 bp, synthetic construct
  misc_feature 1..10: note = intronic recognition element for splicing modifier (REMS)
  source 1..10: mol_type = other DNA
atgagtaagt

SEQ ID NO: 2858 - DNA, 10 bp, synthetic construct
  misc_feature 1..10: note = intronic recognition element for splicing modifier (REMS)
  source 1..10: mol_type = other DNA
ctgagtaagt

SEQ ID NO: 2859 - DNA, 10 bp, synthetic construct
  misc_feature 1..10: note = intronic recognition element for splicing modifier (REMS)
  source 1..10: mol_type = other DNA
gtgagtaagt

SEQ ID NO: 2860 - DNA, 10 bp, synthetic construct
  misc_feature 1..10: note = intronic recognition element for splicing modifier (REMS)
  source 1..10: mol_type = other DNA
ttgagtaagt

SEQ ID NO: 2861-2862 - skipped (2 entries)

SEQ ID NO: 2863 - DNA, 10 bp, synthetic construct
  misc_feature 1..10: note = intronic recognition element for splicing modifier (REMS)
  source 1..10: mol_type = other DNA
aagagtacgt

SEQ ID NO: 2864 - DNA, 10 bp, synthetic construct
  misc_feature 1..10: note = intronic recognition element for splicing modifier (REMS)
  source 1..10: mol_type = other DNA
cagagtacgt

SEQ ID NO: 2865 - DNA, 10 bp, synthetic construct
  misc_feature 1..10: note = intronic recognition element for splicing modifier (REMS)
  source 1..10: mol_type = other DNA
gagagtacgt

SEQ ID NO: 2866 - DNA, 10 bp, synthetic construct
  misc_feature 1..10: note = intronic recognition element for splicing modifier (REMS)
  source 1..10: mol_type = other DNA
tagagtacgt

SEQ ID NO: 2867-2868 - skipped (2 entries)

SEQ ID NO: 2869 - DNA, 10 bp, synthetic construct
  misc_feature 1..10: note = intronic recognition element for splicing modifier (REMS)
  source 1..10: mol_type = other DNA
acgagtacgt

SEQ ID NO: 2870 - DNA, 10 bp, synthetic construct
  misc_feature 1..10: note = intronic recognition element for splicing modifier (REMS)
  source 1..10: mol_type = other DNA
ccgagtacgt

SEQ ID NO: 2871 - DNA, 10 bp, synthetic construct
  misc_feature 1..10: note = intronic recognition element for splicing modifier (REMS)
  source 1..10: mol_type = other DNA
gcgagtacgt

SEQ ID NO: 2872 - DNA, 10 bp, synthetic construct
  misc_feature 1..10: note = intronic recognition element for splicing modifier (REMS)
  source 1..10: mol_type = other DNA
tcgagtacgt

SEQ ID NO: 2873-2874 - skipped (2 entries)

SEQ ID NO: 2875 - DNA, 10 bp, synthetic construct
  misc_feature 1..10: note = intronic recognition element for splicing modifier (REMS)
  source 1..10: mol_type = other DNA
aggagtacgt

SEQ ID NO: 2876 - DNA, 10 bp, synthetic construct
  misc_feature 1..10: note = intronic recognition element for splicing modifier (REMS)
  source 1..10: mol_type = other DNA
cggagtacgt

SEQ ID NO: 2877 - DNA, 10 bp, synthetic construct
  misc_feature 1..10: note = intronic recognition element for splicing modifier (REMS)
  source 1..10: mol_type = other DNA
gggagtacgt

SEQ ID NO: 2878 - DNA, 10 bp, synthetic construct
  misc_feature 1..10: note = intronic recognition element for splicing modifier (REMS)
  source 1..10: mol_type = other DNA
tggagtacgt

SEQ ID NO: 2879-2880 - skipped (2 entries)

SEQ ID NO: 2881 - DNA, 10 bp, synthetic construct
  misc_feature 1..10: note = intronic recognition element for splicing modifier (REMS)
  source 1..10: mol_type = other DNA
atgagtacgt

SEQ ID NO: 2882 - DNA, 10 bp, synthetic construct
  misc_feature 1..10: note = intronic recognition element for splicing modifier (REMS)
  source 1..10: mol_type = other DNA
ctgagtacgt

SEQ ID NO: 2883 - DNA, 10 bp, synthetic construct
  misc_feature 1..10: note = intronic recognition element for splicing modifier (REMS)
  source 1..10: mol_type = other DNA
gtgagtacgt

SEQ ID NO: 2884 - DNA, 10 bp, synthetic construct
  misc_feature 1..10: note = intronic recognition element for splicing modifier (REMS)
  source 1..10: mol_type = other DNA
ttgagtacgt

SEQ ID NO: 2885-2886 - skipped (2 entries)

SEQ ID NO: 2887 - DNA, 10 bp, synthetic construct
  misc_feature 1..10: note = intronic recognition element for splicing modifier (REMS)
  source 1..10: mol_type = other DNA
aagagtaggt

SEQ ID NO: 2888 - DNA, 10 bp, synthetic construct
  misc_feature 1..10: note = intronic recognition element for splicing modifier (REMS)
  source 1..10: mol_type = other DNA
cagagtaggt

SEQ ID NO: 2889 - DNA, 10 bp, synthetic construct
  misc_feature 1..10: note = intronic recognition element for splicing modifier (REMS)
  source 1..10: mol_type = other DNA
gagagtaggt

SEQ ID NO: 2890 - DNA, 10 bp, synthetic construct
  misc_feature 1..10: note = intronic recognition element for splicing modifier (REMS)
  source 1..10: mol_type = other DNA
tagagtaggt

SEQ ID NO: 2891-2892 - skipped (2 entries)

SEQ ID NO: 2893 - DNA, 10 bp, synthetic construct
  misc_feature 1..10: note = intronic recognition element for splicing modifier (REMS)
  source 1..10: mol_type = other DNA
acgagtaggt

SEQ ID NO: 2894 - DNA, 10 bp, synthetic construct
  misc_feature 1..10: note = intronic recognition element for splicing modifier (REMS)
  source 1..10: mol_type = other DNA
ccgagtaggt

SEQ ID NO: 2895 - DNA, 10 bp, synthetic construct
  misc_feature 1..10: note = intronic recognition element for splicing modifier (REMS)
  source 1..10: mol_type = other DNA
gcgagtaggt

SEQ ID NO: 2896 - DNA, 10 bp, synthetic construct
  misc_feature 1..10: note = intronic recognition element for splicing modifier (REMS)
  source 1..10: mol_type = other DNA
tcgagtaggt

SEQ ID NO: 2897-2898 - skipped (2 entries)

SEQ ID NO: 2899 - DNA, 10 bp, synthetic construct
  misc_feature 1..10: note = intronic recognition element for splicing modifier (REMS)
  source 1..10: mol_type = other DNA
aggagtaggt

SEQ ID NO: 2900 - DNA, 10 bp, synthetic construct
  misc_feature 1..10: note = intronic recognition element for splicing modifier (REMS)
  source 1..10: mol_type = other DNA
cggagtaggt

SEQ ID NO: 2901 - DNA, 10 bp, synthetic construct
  misc_feature 1..10: note = intronic recognition element for splicing modifier (REMS)
  source 1..10: mol_type = other DNA
gggagtaggt

SEQ ID NO: 2902 - DNA, 10 bp, synthetic construct
  misc_feature 1..10: note = intronic recognition element for splicing modifier (REMS)
  source 1..10: mol_type = other DNA
tggagtaggt

SEQ ID NO: 2903-2904 - skipped (2 entries)

SEQ ID NO: 2905 - DNA, 10 bp, synthetic construct
  misc_feature 1..10: note = intronic recognition element for splicing modifier (REMS)
  source 1..10: mol_type = other DNA
atgagtaggt

SEQ ID NO: 2906 - DNA, 10 bp, synthetic construct
  misc_feature 1..10: note = intronic recognition element for splicing modifier (REMS)
  source 1..10: mol_type = other DNA
ctgagtaggt

SEQ ID NO: 2907 - DNA, 10 bp, synthetic construct
  misc_feature 1..10: note = intronic recognition element for splicing modifier (REMS)
  source 1..10: mol_type = other DNA
gtgagtaggt

SEQ ID NO: 2908 - DNA, 10 bp, synthetic construct
  misc_feature 1..10: note = intronic recognition element for splicing modifier (REMS)
  source 1..10: mol_type = other DNA
ttgagtaggt

SEQ ID NO: 2909-2910 - skipped (2 entries)

SEQ ID NO: 2911 - DNA, 10 bp, synthetic construct
  misc_feature 1..10: note = intronic recognition element for splicing modifier (REMS)
  source 1..10: mol_type = other DNA
aagagtatgt

SEQ ID NO: 2912 - DNA, 10 bp, synthetic construct
  misc_feature 1..10: note = intronic recognition element for splicing modifier (REMS)
  source 1..10: mol_type = other DNA
cagagtatgt

SEQ ID NO: 2913 - DNA, 10 bp, synthetic construct
  misc_feature 1..10: note = intronic recognition element for splicing modifier (REMS)
  source 1..10: mol_type = other DNA
gagagtatgt

SEQ ID NO: 2914 - DNA, 10 bp, synthetic construct
  misc_feature 1..10: note = intronic recognition element for splicing modifier (REMS)
  source 1..10: mol_type = other DNA
tagagtatgt

SEQ ID NO: 2915-2916 - skipped (2 entries)

SEQ ID NO: 2917 - DNA, 10 bp, synthetic construct
  misc_feature 1..10: note = intronic recognition element for splicing modifier (REMS)
  source 1..10: mol_type = other DNA
acgagtatgt

SEQ ID NO: 2918 - DNA, 10 bp, synthetic construct
  misc_feature 1..10: note = intronic recognition element for splicing modifier (REMS)
  source 1..10: mol_type = other DNA
ccgagtatgt

SEQ ID NO: 2919 - DNA, 10 bp, synthetic construct
  misc_feature 1..10: note = intronic recognition element for splicing modifier (REMS)
  source 1..10: mol_type = other DNA
gcgagtatgt

SEQ ID NO: 2920 - DNA, 10 bp, synthetic construct
  misc_feature 1..10: note = intronic recognition element for splicing modifier (REMS)
  source 1..10: mol_type = other DNA
tcgagtatgt

SEQ ID NO: 2921-2922 - skipped (2 entries)

SEQ ID NO: 2923 - DNA, 10 bp, synthetic construct
  misc_feature 1..10: note = intronic recognition element for splicing modifier (REMS)
  source 1..10: mol_type = other DNA
aggagtatgt

SEQ ID NO: 2924 - DNA, 10 bp, synthetic construct
  misc_feature 1..10: note = intronic recognition element for splicing modifier (REMS)
  source 1..10: mol_type = other DNA
cggagtatgt

SEQ ID NO: 2925 - DNA, 10 bp, synthetic construct
  misc_feature 1..10: note = intronic recognition element for splicing modifier (REMS)
  source 1..10: mol_type = other DNA
gggagtatgt

SEQ ID NO: 2926 - DNA, 10 bp, synthetic construct
  misc_feature 1..10: note = intronic recognition element for splicing modifier (REMS)
  source 1..10: mol_type = other DNA
tggagtatgt

SEQ ID NO: 2927-2928 - skipped (2 entries)

SEQ ID NO: 2929 - DNA, 10 bp, synthetic construct
  misc_feature 1..10: note = intronic recognition element for splicing modifier (REMS)
  source 1..10: mol_type = other DNA
atgagtatgt

SEQ ID NO: 2930 - DNA, 10 bp, synthetic construct
  misc_feature 1..10: note = intronic recognition element for splicing modifier (REMS)
  source 1..10: mol_type = other DNA
ctgagtatgt

SEQ ID NO: 2931 - DNA, 10 bp, synthetic construct
  misc_feature 1..10: note = intronic recognition element for splicing modifier (REMS)
  source 1..10: mol_type = other DNA
gtgagtatgt

SEQ ID NO: 2932 - DNA, 10 bp, synthetic construct
  misc_feature 1..10: note = intronic recognition element for splicing modifier (REMS)
  source 1..10: mol_type = other DNA
ttgagtatgt

SEQ ID NO: 2933-3150 - skipped (218 entries)

SEQ ID NO: 3151 - DNA, 10 bp, synthetic construct
  misc_feature 1..10: note = intronic recognition element for splicing modifier (REMS)
  source 1..10: mol_type = other DNA
aagagtgaga

SEQ ID NO: 3152 - DNA, 10 bp, synthetic construct
  misc_feature 1..10: note = intronic recognition element for splicing modifier (REMS)
  source 1..10: mol_type = other DNA
cagagtgaga

SEQ ID NO: 3153 - DNA, 10 bp, synthetic construct
  misc_feature 1..10: note = intronic recognition element for splicing modifier (REMS)
  source 1..10: mol_type = other DNA
gagagtgaga

SEQ ID NO: 3154 - DNA, 10 bp, synthetic construct
  misc_feature 1..10: note = intronic recognition element for splicing modifier (REMS)
  source 1..10: mol_type = other DNA
tagagtgaga

SEQ ID NO: 3155-3156 - skipped (2 entries)

SEQ ID NO: 3157 - DNA, 10 bp, synthetic construct
  misc_feature 1..10: note = intronic recognition element for splicing modifier (REMS)
  source 1..10: mol_type = other DNA
acgagtgaga

SEQ ID NO: 3158 - DNA, 10 bp, synthetic construct
  misc_feature 1..10: note = intronic recognition element for splicing modifier (REMS)
  source 1..10: mol_type = other DNA
ccgagtgaga

SEQ ID NO: 3159 - DNA, 10 bp, synthetic construct
  misc_feature 1..10: note = intronic recognition element for splicing modifier (REMS)
  source 1..10: mol_type = other DNA
gcgagtgaga

SEQ ID NO: 3160 - DNA, 10 bp, synthetic construct
  misc_feature 1..10: note = intronic recognition element for splicing modifier (REMS)
  source 1..10: mol_type = other DNA
tcgagtgaga

SEQ ID NO: 3161-3162 - skipped (2 entries)

SEQ ID NO: 3163 - DNA, 10 bp, synthetic construct
  misc_feature 1..10: note = intronic recognition element for splicing modifier (REMS)
  source 1..10: mol_type = other DNA
aggagtgaga

SEQ ID NO: 3164 - DNA, 10 bp, synthetic construct
  misc_feature 1..10: note = intronic recognition element for splicing modifier (REMS)
  source 1..10: mol_type = other DNA
cggagtgaga

SEQ ID NO: 3165 - DNA, 10 bp, synthetic construct
  misc_feature 1..10: note = intronic recognition element for splicing modifier (REMS)
  source 1..10: mol_type = other DNA
gggagtgaga

SEQ ID NO: 3166 - DNA, 10 bp, synthetic construct
  misc_feature 1..10: note = intronic recognition element for splicing modifier (REMS)
  source 1..10: mol_type = other DNA
tggagtgaga

SEQ ID NO: 3167-3168 - skipped (2 entries)

SEQ ID NO: 3169 - DNA, 10 bp, synthetic construct
  misc_feature 1..10: note = intronic recognition element for splicing modifier (REMS)
  source 1..10: mol_type = other DNA
atgagtgaga

SEQ ID NO: 3170 - DNA, 10 bp, synthetic construct
  misc_feature 1..10: note = intronic recognition element for splicing modifier (REMS)
  source 1..10: mol_type = other DNA
ctgagtgaga

SEQ ID NO: 3171 - DNA, 10 bp, synthetic construct
  misc_feature 1..10: note = intronic recognition element for splicing modifier (REMS)
  source 1..10: mol_type = other DNA
gtgagtgaga

SEQ ID NO: 3172 - DNA, 10 bp, synthetic construct
  misc_feature 1..10: note = intronic recognition element for splicing modifier (REMS)
  source 1..10: mol_type = other DNA
ttgagtgaga

SEQ ID NO: 3173-3174 - skipped (2 entries)

SEQ ID NO: 3175 - DNA, 10 bp, synthetic construct
  misc_feature 1..10: note = intronic recognition element for splicing modifier (REMS)
  source 1..10: mol_type = other DNA
aagagtgcga

SEQ ID NO: 3176 - DNA, 10 bp, synthetic construct
  misc_feature 1..10: note = intronic recognition element for splicing modifier (REMS)
  source 1..10: mol_type = other DNA
cagagtgcga

SEQ ID NO: 3177 - DNA, 10 bp, synthetic construct
  misc_feature 1..10: note = intronic recognition element for splicing modifier (REMS)
  source 1..10: mol_type = other DNA
gagagtgcga

SEQ ID NO: 3178 - DNA, 10 bp, synthetic construct
  misc_feature 1..10: note = intronic recognition element for splicing modifier (REMS)
  source 1..10: mol_type = other DNA
tagagtgcga

SEQ ID NO: 3179-3180 - skipped (2 entries)

SEQ ID NO: 3181 - DNA, 10 bp, synthetic construct
  misc_feature 1..10: note = intronic recognition element for splicing modifier (REMS)
  source 1..10: mol_type = other DNA
acgagtgcga

SEQ ID NO: 3182 - DNA, 10 bp, synthetic construct
  misc_feature 1..10: note = intronic recognition element for splicing modifier (REMS)
  source 1..10: mol_type = other DNA
ccgagtgcga

SEQ ID NO: 3183 - DNA, 10 bp, synthetic construct
  misc_feature 1..10: note = intronic recognition element for splicing modifier (REMS)
  source 1..10: mol_type = other DNA
gcgagtgcga

SEQ ID NO: 3184 - DNA, 10 bp, synthetic construct
  misc_feature 1..10: note = intronic recognition element for splicing modifier (REMS)
  source 1..10: mol_type = other DNA
tcgagtgcga

SEQ ID NO: 3185-3186 - skipped (2 entries)

SEQ ID NO: 3187 - DNA, 10 bp, synthetic construct
  misc_feature 1..10: note = intronic recognition element for splicing modifier (REMS)
  source 1..10: mol_type = other DNA
aggagtgcga

SEQ ID NO: 3188 - DNA, 10 bp, synthetic construct
  misc_feature 1..10: note = intronic recognition element for splicing modifier (REMS)
  source 1..10: mol_type = other DNA
cggagtgcga

SEQ ID NO: 3189 - DNA, 10 bp, synthetic construct
  misc_feature 1..10: note = intronic recognition element for splicing modifier (REMS)
  source 1..10: mol_type = other DNA
gggagtgcga

SEQ ID NO: 3190 - DNA, 10 bp, synthetic construct
  misc_feature 1..10: note = intronic recognition element for splicing modifier (REMS)
  source 1..10: mol_type = other DNA
tggagtgcga

SEQ ID NO: 3191-3192 - skipped (2 entries)

SEQ ID NO: 3193 - DNA, 10 bp, synthetic construct
  misc_feature 1..10: note = intronic recognition element for splicing modifier (REMS)
  source 1..10: mol_type = other DNA
atgagtgcga

SEQ ID NO: 3194 - DNA, 10 bp, synthetic construct
  misc_feature 1..10: note = intronic recognition element for splicing modifier (REMS)
  source 1..10: mol_type = other DNA
ctgagtgcga

SEQ ID NO: 3195 - DNA, 10 bp, synthetic construct
  misc_feature 1..10: note = intronic recognition element for splicing modifier (REMS)
  source 1..10: mol_type = other DNA
gtgagtgcga

SEQ ID NO: 3196 - DNA, 10 bp, synthetic construct
  misc_feature 1..10: note = intronic recognition element for splicing modifier (REMS)
  source 1..10: mol_type = other DNA
ttgagtgcga

SEQ ID NO: 3197-3198 - skipped (2 entries)

SEQ ID NO: 3199 - DNA, 10 bp, synthetic construct
  misc_feature 1..10: note = intronic recognition element for splicing modifier (REMS)
  source 1..10: mol_type = other DNA
aagagtggga

SEQ ID NO: 3200 - DNA, 10 bp, synthetic construct
  misc_feature 1..10: note = intronic recognition element for splicing modifier (REMS)
  source 1..10: mol_type = other DNA
cagagtggga

SEQ ID NO: 3201 - DNA, 10 bp, synthetic construct
  misc_feature 1..10: note = intronic recognition element for splicing modifier (REMS)
  source 1..10: mol_type = other DNA
gagagtggga

SEQ ID NO: 3202 - DNA, 10 bp, synthetic construct
  misc_feature 1..10: note = intronic recognition element for splicing modifier (REMS)
  source 1..10: mol_type = other DNA
tagagtggga

SEQ ID NO: 3203-3204 - skipped (2 entries)

SEQ ID NO: 3205 - DNA, 10 bp, synthetic construct
  misc_feature 1..10: note = intronic recognition element for splicing modifier (REMS)
  source 1..10: mol_type = other DNA
acgagtggga

SEQ ID NO: 3206 - DNA, 10 bp, synthetic construct
  misc_feature 1..10: note = intronic recognition element for splicing modifier (REMS)
  source 1..10: mol_type = other DNA
ccgagtggga

SEQ ID NO: 3207 - DNA, 10 bp, synthetic construct
  misc_feature 1..10: note = intronic recognition element for splicing modifier (REMS)
  source 1..10: mol_type = other DNA
gcgagtggga

SEQ ID NO: 3208 - DNA, 10 bp, synthetic construct
  misc_feature 1..10: note = intronic recognition element for splicing modifier (REMS)
  source 1..10: mol_type = other DNA
tcgagtggga

SEQ ID NO: 3209-3210 - skipped (2 entries)

SEQ ID NO: 3211 - DNA, 10 bp, synthetic construct
  misc_feature 1..10: note = intronic recognition element for splicing modifier (REMS)
  source 1..10: mol_type = other DNA
aggagtggga

SEQ ID NO: 3212 - DNA, 10 bp, synthetic construct
  misc_feature 1..10: note = intronic recognition element for splicing modifier (REMS)
  source 1..10: mol_type = other DNA
cggagtggga

SEQ ID NO: 3213 - DNA, 10 bp, synthetic construct
  misc_feature 1..10: note = intronic recognition element for splicing modifier (REMS)
  source 1..10: mol_type = other DNA
gggagtggga

SEQ ID NO: 3214 - DNA, 10 bp, synthetic construct
  misc_feature 1..10: note = intronic recognition element for splicing modifier (REMS)
  source 1..10: mol_type = other DNA
tggagtggga

SEQ ID NO: 3215-3216 - skipped (2 entries)

SEQ ID NO: 3217 - DNA, 10 bp, synthetic construct
  misc_feature 1..10: note = intronic recognition element for splicing modifier (REMS)
  source 1..10: mol_type = other DNA
atgagtggga

SEQ ID NO: 3218 - DNA, 10 bp, synthetic construct
  misc_feature 1..10: note = intronic recognition element for splicing modifier (REMS)
  source 1..10: mol_type = other DNA
ctgagtggga

SEQ ID NO: 3219 - DNA, 10 bp, synthetic construct
  misc_feature 1..10: note = intronic recognition element for splicing modifier (REMS)
  source 1..10: mol_type = other DNA
gtgagtggga

SEQ ID NO: 3220 - DNA, 10 bp, synthetic construct
  misc_feature 1..10: note = intronic recognition element for splicing modifier (REMS)
  source 1..10: mol_type = other DNA
ttgagtggga

SEQ ID NO: 3221-3222 - skipped (2 entries)

SEQ ID NO: 3223 - DNA, 10 bp, synthetic construct
  misc_feature 1..10: note = intronic recognition element for splicing modifier (REMS)
  source 1..10: mol_type = other DNA
aagagtgtga

SEQ ID NO: 3224 - DNA, 10 bp, synthetic construct
  misc_feature 1..10: note = intronic recognition element for splicing modifier (REMS)
  source 1..10: mol_type = other DNA
cagagtgtga

SEQ ID NO: 3225 - DNA, 10 bp, synthetic construct
  misc_feature 1..10: note = intronic recognition element for splicing modifier (REMS)
  source 1..10: mol_type = other DNA
gagagtgtga

SEQ ID NO: 3226 - DNA, 10 bp, synthetic construct
  misc_feature 1..10: note = intronic recognition element for splicing modifier (REMS)
  source 1..10: mol_type = other DNA
tagagtgtga

SEQ ID NO: 3227-3228 - skipped (2 entries)

SEQ ID NO: 3229 - DNA, 10 bp, synthetic construct
  misc_feature 1..10: note = intronic recognition element for splicing modifier (REMS)
  source 1..10: mol_type = other DNA
acgagtgtga

SEQ ID NO: 3230 - DNA, 10 bp, synthetic construct
  misc_feature 1..10: note = intronic recognition element for splicing modifier (REMS)
  source 1..10: mol_type = other DNA
ccgagtgtga

SEQ ID NO: 3231 - DNA, 10 bp, synthetic construct
  misc_feature 1..10: note = intronic recognition element for splicing modifier (REMS)
  source 1..10: mol_type = other DNA
gcgagtgtga

SEQ ID NO: 3232 - DNA, 10 bp, synthetic construct
  misc_feature 1..10: note = intronic recognition element for splicing modifier (REMS)
  source 1..10: mol_type = other DNA
tcgagtgtga

SEQ ID NO: 3233-3234 - skipped (2 entries)

SEQ ID NO: 3235 - DNA, 10 bp, synthetic construct
  misc_feature 1..10: note = intronic recognition element for splicing modifier (REMS)
  source 1..10: mol_type = other DNA
aggagtgtga

SEQ ID NO: 3236 - DNA, 10 bp, synthetic construct
  misc_feature 1..10: note = intronic recognition element for splicing modifier (REMS)
  source 1..10: mol_type = other DNA
cggagtgtga

SEQ ID NO: 3237 - DNA, 10 bp, synthetic construct
  misc_feature 1..10: note = intronic recognition element for splicing modifier (REMS)
  source 1..10: mol_type = other DNA
gggagtgtga

SEQ ID NO: 3238 - DNA, 10 bp, synthetic construct
  misc_feature 1..10: note = intronic recognition element for splicing modifier (REMS)
  source 1..10: mol_type = other DNA
tggagtgtga

SEQ ID NO: 3239-3240 - skipped (2 entries)

SEQ ID NO: 3241 - DNA, 10 bp, synthetic construct
  misc_feature 1..10: note = intronic recognition element for splicing modifier (REMS)
  source 1..10: mol_type = other DNA
atgagtgtga

SEQ ID NO: 3242 - DNA, 10 bp, synthetic construct
  misc_feature 1..10: note = intronic recognition element for splicing modifier (REMS)
  source 1..10: mol_type = other DNA
ctgagtgtga

SEQ ID NO: 3243 - DNA, 10 bp, synthetic construct
  misc_feature 1..10: note = intronic recognition element for splicing modifier (REMS)
  source 1..10: mol_type = other DNA
gtgagtgtga

SEQ ID NO: 3244 - DNA, 10 bp, synthetic construct
  misc_feature 1..10: note = intronic recognition element for splicing modifier (REMS)
  source 1..10: mol_type = other DNA
ttgagtgtga

SEQ ID NO: 3245-3246 - skipped (2 entries)

SEQ ID NO: 3247 - DNA, 10 bp, synthetic construct
  misc_feature 1..10: note = intronic recognition element for splicing modifier (REMS)
  source 1..10: mol_type = other DNA
aagagtgagc

SEQ ID NO: 3248 - DNA, 10 bp, synthetic construct
  misc_feature 1..10: note = intronic recognition element for splicing modifier (REMS)
  source 1..10: mol_type = other DNA
cagagtgagc

SEQ ID NO: 3249 - DNA, 10 bp, synthetic construct
  misc_feature 1..10: note = intronic recognition element for splicing modifier (REMS)
  source 1..10: mol_type = other DNA
gagagtgagc

SEQ ID NO: 3250 - DNA, 10 bp, synthetic construct
  misc_feature 1..10: note = intronic recognition element for splicing modifier (REMS)
  source 1..10: mol_type = other DNA
tagagtgagc

SEQ ID NO: 3251-3252 - skipped (2 entries)

SEQ ID NO: 3253 - DNA, 10 bp, synthetic construct
  misc_feature 1..10: note = intronic recognition element for splicing modifier (REMS)
  source 1..10: mol_type = other DNA
acgagtgagc

SEQ ID NO: 3254 - DNA, 10 bp, synthetic construct
  misc_feature 1..10: note = intronic recognition element for splicing modifier (REMS)
  source 1..10: mol_type = other DNA
ccgagtgagc

SEQ ID NO: 3255 - DNA, 10 bp, synthetic construct
  misc_feature 1..10: note = intronic recognition element for splicing modifier (REMS)
  source 1..10: mol_type = other DNA
gcgagtgagc

SEQ ID NO: 3256 - DNA, 10 bp, synthetic construct
  misc_feature 1..10: note = intronic recognition element for splicing modifier (REMS)
  source 1..10: mol_type = other DNA
tcgagtgagc

SEQ ID NO: 3257-3258 - skipped (2 entries)

SEQ ID NO: 3259 - DNA, 10 bp, synthetic construct
  misc_feature 1..10: note = intronic recognition element for splicing modifier (REMS)
  source 1..10: mol_type = other DNA
aggagtgagc

SEQ ID NO: 3260 - DNA, 10 bp, synthetic construct
  misc_feature 1..10: note = intronic recognition element for splicing modifier (REMS)
  source 1..10: mol_type = other DNA
cggagtgagc

SEQ ID NO: 3261 - DNA, 10 bp, synthetic construct
  misc_feature 1..10: note = intronic recognition element for splicing modifier (REMS)
  source 1..10: mol_type = other DNA
gggagtgagc

SEQ ID NO: 3262 - DNA, 10 bp, synthetic construct
  misc_feature 1..10: note = intronic recognition element for splicing modifier (REMS)
  source 1..10: mol_type = other DNA
tggagtgagc

SEQ ID NO: 3263-3264 - skipped (2 entries)

SEQ ID NO: 3265 - DNA, 10 bp, synthetic construct
  misc_feature 1..10: note = intronic recognition element for splicing modifier (REMS)
  source 1..10: mol_type = other DNA
atgagtgagc

SEQ ID NO: 3266 - DNA, 10 bp, synthetic construct
  misc_feature 1..10: note = intronic recognition element for splicing modifier (REMS)
  source 1..10: mol_type = other DNA
ctgagtgagc

SEQ ID NO: 3267 - DNA, 10 bp, synthetic construct
  misc_feature 1..10: note = intronic recognition element for splicing modifier (REMS)
  source 1..10: mol_type = other DNA
gtgagtgagc

SEQ ID NO: 3268 - DNA, 10 bp, synthetic construct
  misc_feature 1..10: note = intronic recognition element for splicing modifier (REMS)
  source 1..10: mol_type = other DNA
ttgagtgagc

SEQ ID NO: 3269-3270 - skipped (2 entries)

SEQ ID NO: 3271 - DNA, 10 bp, synthetic construct
  misc_feature 1..10: note = intronic recognition element for splicing modifier (REMS)
  source 1..10: mol_type = other DNA
aagagtgcgc

SEQ ID NO: 3272 - DNA, 10 bp, synthetic construct
  misc_feature 1..10: note = intronic recognition element for splicing modifier (REMS)
  source 1..10: mol_type = other DNA
cagagtgcgc

SEQ ID NO: 3273 - DNA, 10 bp, synthetic construct
  misc_feature 1..10: note = intronic recognition element for splicing modifier (REMS)
  source 1..10: mol_type = other DNA
gagagtgcgc

SEQ ID NO: 3274 - DNA, 10 bp, synthetic construct
  misc_feature 1..10: note = intronic recognition element for splicing modifier (REMS)
  source 1..10: mol_type = other DNA
tagagtgcgc

SEQ ID NO: 3275-3276 - skipped (2 entries)

SEQ ID NO: 3277 - DNA, 10 bp, synthetic construct
  misc_feature 1..10: note = intronic recognition element for splicing modifier (REMS)
  source 1..10: mol_type = other DNA
acgagtgcgc

SEQ ID NO: 3278 - DNA, 10 bp, synthetic construct
  misc_feature 1..10: note = intronic recognition element for splicing modifier (REMS)
  source 1..10: mol_type = other DNA
ccgagtgcgc

SEQ ID NO: 3279 - DNA, 10 bp, synthetic construct
  misc_feature 1..10: note = intronic recognition element for splicing modifier (REMS)
  source 1..10: mol_type = other DNA
gcgagtgcgc

SEQ ID NO: 3280 - DNA, 10 bp, synthetic construct
  misc_feature 1..10: note = intronic recognition element for splicing modifier (REMS)
  source 1..10: mol_type = other DNA
tcgagtgcgc

SEQ ID NO: 3281-3282 - skipped (2 entries)

SEQ ID NO: 3283 - DNA, 10 bp, synthetic construct
  misc_feature 1..10: note = intronic recognition element for splicing modifier (REMS)
  source 1..10: mol_type = other DNA
aggagtgcgc

SEQ ID NO: 3284 - DNA, 10 bp, synthetic construct
  misc_feature 1..10: note = intronic recognition element for splicing modifier (REMS)
  source 1..10: mol_type = other DNA
cggagtgcgc

SEQ ID NO: 3285 - DNA, 10 bp, synthetic construct
  misc_feature 1..10: note = intronic recognition element for splicing modifier (REMS)
  source 1..10: mol_type = other DNA
gggagtgcgc

SEQ ID NO: 3286 - DNA, 10 bp, synthetic construct
  misc_feature 1..10: note = intronic recognition element for splicing modifier (REMS)
  source 1..10: mol_type = other DNA
tggagtgcgc

SEQ ID NO: 3287-3288 - skipped (2 entries)

SEQ ID NO: 3289 - DNA, 10 bp, synthetic construct
  misc_feature 1..10: note = intronic recognition element for splicing modifier (REMS)
  source 1..10: mol_type = other DNA
atgagtgcgc

SEQ ID NO: 3290 - DNA, 10 bp, synthetic construct
  misc_feature 1..10: note = intronic recognition element for splicing modifier (REMS)
  source 1..10: mol_type = other DNA
ctgagtgcgc

SEQ ID NO: 3291 - DNA, 10 bp, synthetic construct
  misc_feature 1..10: note = intronic recognition element for splicing modifier (REMS)
  source 1..10: mol_type = other DNA
gtgagtgcgc

SEQ ID NO: 3292 - DNA, 10 bp, synthetic construct
  misc_feature 1..10: note = intronic recognition element for splicing modifier (REMS)
  source 1..10: mol_type = other DNA
ttgagtgcgc

SEQ ID NO: 3293-3294 - skipped (2 entries)

SEQ ID NO: 3295 - DNA, 10 bp, synthetic construct
  misc_feature 1..10: note = intronic recognition element for splicing modifier (REMS)
  source 1..10: mol_type = other DNA
aagagtgggc

SEQ ID NO: 3296 - DNA, 10 bp, synthetic construct
  misc_feature 1..10: note = intronic recognition element for splicing modifier (REMS)
  source 1..10: mol_type = other DNA
cagagtgggc

SEQ ID NO: 3297 - DNA, 10 bp, synthetic construct
  misc_feature 1..10: note = intronic recognition element for splicing modifier (REMS)
  source 1..10: mol_type = other DNA
gagagtgggc

SEQ ID NO: 3298 - DNA, 10 bp, synthetic construct
  misc_feature 1..10: note = intronic recognition element for splicing modifier (REMS)
  source 1..10: mol_type = other DNA
tagagtgggc

SEQ ID NO: 3299-3300 - skipped (2 entries)

SEQ ID NO: 3301 - DNA, 10 bp, synthetic construct
  misc_feature 1..10: note = intronic recognition element for splicing modifier (REMS)
  source 1..10: mol_type = other DNA
acgagtgggc

SEQ ID NO: 3302 - DNA, 10 bp, synthetic construct
  misc_feature 1..10: note = intronic recognition element for splicing modifier (REMS)
  source 1..10: mol_type = other DNA
ccgagtgggc

SEQ ID NO: 3303 - DNA, 10 bp, synthetic construct
  misc_feature 1..10: note = intronic recognition element for splicing modifier (REMS)
  source 1..10: mol_type = other DNA
gcgagtgggc

SEQ ID NO: 3304 - DNA, 10 bp, synthetic construct
  misc_feature 1..10: note = intronic recognition element for splicing modifier (REMS)
  source 1..10: mol_type = other DNA
tcgagtgggc

SEQ ID NO: 3305-3306 - skipped (2 entries)

SEQ ID NO: 3307 - DNA, 10 bp, synthetic construct
  misc_feature 1..10: note = intronic recognition element for splicing modifier (REMS)
  source 1..10: mol_type = other DNA
aggagtgggc

SEQ ID NO: 3308 - DNA, 10 bp, synthetic construct
  misc_feature 1..10: note = intronic recognition element for splicing modifier (REMS)
  source 1..10: mol_type = other DNA
cggagtgggc

SEQ ID NO: 3309 - DNA, 10 bp, synthetic construct
  misc_feature 1..10: note = intronic recognition element for splicing modifier (REMS)
  source 1..10: mol_type = other DNA
gggagtgggc

SEQ ID NO: 3310 - DNA, 10 bp, synthetic construct
  misc_feature 1..10: note = intronic recognition element for splicing modifier (REMS)
  source 1..10: mol_type = other DNA
tggagtgggc

SEQ ID NO: 3311-3312 - skipped (2 entries)

SEQ ID NO: 3313 - DNA, 10 bp, synthetic construct
  misc_feature 1..10: note = intronic recognition element for splicing modifier (REMS)
  source 1..10: mol_type = other DNA
atgagtgggc

SEQ ID NO: 3314 - DNA, 10 bp, synthetic construct
  misc_feature 1..10: note = intronic recognition element for splicing modifier (REMS)
  source 1..10: mol_type = other DNA
ctgagtgggc

SEQ ID NO: 3315 - DNA, 10 bp, synthetic construct
  misc_feature 1..10: note = intronic recognition element for splicing modifier (REMS)
  source 1..10: mol_type = other DNA
gtgagtgggc

SEQ ID NO: 3316 - DNA, 10 bp, synthetic construct
  misc_feature 1..10: note = intronic recognition element for splicing modifier (REMS)
  source 1..10: mol_type = other DNA
ttgagtgggc

SEQ ID NO: 3317-3318 - skipped (2 entries)

SEQ ID NO: 3319 - DNA, 10 bp, synthetic construct
  misc_feature 1..10: note = intronic recognition element for splicing modifier (REMS)
  source 1..10: mol_type = other DNA
aagagtgtgc

SEQ ID NO: 3320 - DNA, 10 bp, synthetic construct
  misc_feature 1..10: note = intronic recognition element for splicing modifier (REMS)
  source 1..10: mol_type = other DNA
cagagtgtgc

SEQ ID NO: 3321 - DNA, 10 bp, synthetic construct
  misc_feature 1..10: note = intronic recognition element for splicing modifier (REMS)
  source 1..10: mol_type = other DNA
gagagtgtgc

SEQ ID NO: 3322 - DNA, 10 bp, synthetic construct
  misc_feature 1..10: note = intronic recognition element for splicing modifier (REMS)
  source 1..10: mol_type = other DNA
tagagtgtgc

SEQ ID NO: 3323-3324 - skipped (2 entries)

SEQ ID NO: 3325 - DNA, 10 bp, synthetic construct
  misc_feature 1..10: note = intronic recognition element for splicing modifier (REMS)
  source 1..10: mol_type = other DNA
acgagtgtgc

SEQ ID NO: 3326 - DNA, 10 bp, synthetic construct
  misc_feature 1..10: note = intronic recognition element for splicing modifier (REMS)
  source 1..10: mol_type = other DNA
ccgagtgtgc

SEQ ID NO: 3327 - DNA, 10 bp, synthetic construct
  misc_feature 1..10: note = intronic recognition element for splicing modifier (REMS)
  source 1..10: mol_type = other DNA
gcgagtgtgc

SEQ ID NO: 3328 - DNA, 10 bp, synthetic construct
  misc_feature 1..10: note = intronic recognition element for splicing modifier (REMS)
  source 1..10: mol_type = other DNA
tcgagtgtgc

SEQ ID NO: 3329-3330 - skipped (2 entries)

SEQ ID NO: 3331 - DNA, 10 bp, synthetic construct
  misc_feature 1..10: note = intronic recognition element for splicing modifier (REMS)
  source 1..10: mol_type = other DNA
aggagtgtgc

SEQ ID NO: 3332 - DNA, 10 bp, synthetic construct
  misc_feature 1..10: note = intronic recognition element for splicing modifier (REMS)
  source 1..10: mol_type = other DNA
cggagtgtgc

SEQ ID NO: 3333 - DNA, 10 bp, synthetic construct
  misc_feature 1..10: note = intronic recognition element for splicing modifier (REMS)
  source 1..10: mol_type = other DNA
gggagtgtgc

SEQ ID NO: 3334 - DNA, 10 bp, synthetic construct
  misc_feature 1..10: note = intronic recognition element for splicing modifier (REMS)
  source 1..10: mol_type = other DNA
tggagtgtgc

SEQ ID NO: 3335-3336 - skipped (2 entries)

SEQ ID NO: 3337 - DNA, 10 bp, synthetic construct
  misc_feature 1..10: note = intronic recognition element for splicing modifier (REMS)
  source 1..10: mol_type = other DNA
atgagtgtgc

SEQ ID NO: 3338 - DNA, 10 bp, synthetic construct
  misc_feature 1..10: note = intronic recognition element for splicing modifier (REMS)
  source 1..10: mol_type = other DNA
ctgagtgtgc

SEQ ID NO: 3339 - DNA, 10 bp, synthetic construct
  misc_feature 1..10: note = intronic recognition element for splicing modifier (REMS)
  source 1..10: mol_type = other DNA
gtgagtgtgc

SEQ ID NO: 3340 - DNA, 10 bp, synthetic construct
  misc_feature 1..10: note = intronic recognition element for splicing modifier (REMS)
  source 1..10: mol_type = other DNA
ttgagtgtgc

SEQ ID NO: 3341-3342 - skipped (2 entries)

SEQ ID NO: 3343 - DNA, 10 bp, synthetic construct
  misc_feature 1..10: note = intronic recognition element for splicing modifier (REMS)
  source 1..10: mol_type = other DNA
aagagtgagg

SEQ ID NO: 3344 - DNA, 10 bp, synthetic construct
  misc_feature 1..10: note = intronic recognition element for splicing modifier (REMS)
  source 1..10: mol_type = other DNA
cagagtgagg

SEQ ID NO: 3345 - DNA, 10 bp, synthetic construct
  misc_feature 1..10: note = intronic recognition element for splicing modifier (REMS)
  source 1..10: mol_type = other DNA
gagagtgagg

SEQ ID NO: 3346 - DNA, 10 bp, synthetic construct
  misc_feature 1..10: note = intronic recognition element for splicing modifier (REMS)
  source 1..10: mol_type = other DNA
tagagtgagg

SEQ ID NO: 3347-3348 - skipped (2 entries)

SEQ ID NO: 3349 - DNA, 10 bp, synthetic construct
  misc_feature 1..10: note = intronic recognition element for splicing modifier (REMS)
  source 1..10: mol_type = other DNA
acgagtgagg

SEQ ID NO: 3350 - DNA, 10 bp, synthetic construct
  misc_feature 1..10: note = intronic recognition element for splicing modifier (REMS)
  source 1..10: mol_type = other DNA
ccgagtgagg

SEQ ID NO: 3351 - DNA, 10 bp, synthetic construct
  misc_feature 1..10: note = intronic recognition element for splicing modifier (REMS)
  source 1..10: mol_type = other DNA
gcgagtgagg

SEQ ID NO: 3352 - DNA, 10 bp, synthetic construct
  misc_feature 1..10: note = intronic recognition element for splicing modifier (REMS)
  source 1..10: mol_type = other DNA
tcgagtgagg

SEQ ID NO: 3353-3354 - skipped (2 entries)

SEQ ID NO: 3355 - DNA, 10 bp, synthetic construct
  misc_feature 1..10: note = intronic recognition element for splicing modifier (REMS)
  source 1..10: mol_type = other DNA
aggagtgagg

SEQ ID NO: 3356 - DNA, 10 bp, synthetic construct
  misc_feature 1..10: note = intronic recognition element for splicing modifier (REMS)
  source 1..10: mol_type = other DNA
cggagtgagg

SEQ ID NO: 3357 - DNA, 10 bp, synthetic construct
  misc_feature 1..10: note = intronic recognition element for splicing modifier (REMS)
  source 1..10: mol_type = other DNA
gggagtgagg

SEQ ID NO: 3358 - DNA, 10 bp, synthetic construct
  misc_feature 1..10: note = intronic recognition element for splicing modifier (REMS)
  source 1..10: mol_type = other DNA
tggagtgagg

SEQ ID NO: 3359-3360 - skipped (2 entries)

SEQ ID NO: 3361 - DNA, 10 bp, synthetic construct
  misc_feature 1..10: note = intronic recognition element for splicing modifier (REMS)
  source 1..10: mol_type = other DNA
atgagtgagg

SEQ ID NO: 3362 - DNA, 10 bp, synthetic construct
  misc_feature 1..10: note = intronic recognition element for splicing modifier (REMS)
  source 1..10: mol_type = other DNA
ctgagtgagg

SEQ ID NO: 3363 - DNA, 10 bp, synthetic construct
  misc_feature 1..10: note = intronic recognition element for splicing modifier (REMS)
  source 1..10: mol_type = other DNA
gtgagtgagg

SEQ ID NO: 3364 - DNA, 10 bp, synthetic construct
  misc_feature 1..10: note = intronic recognition element for splicing modifier (REMS)
  source 1..10: mol_type = other DNA
ttgagtgagg

SEQ ID NO: 3365-3366 - skipped (2 entries)

SEQ ID NO: 3367 - DNA, 10 bp, synthetic construct
  misc_feature 1..10: note = intronic recognition element for splicing modifier (REMS)
  source 1..10: mol_type = other DNA
aagagtgcgg

SEQ ID NO: 3368 - DNA, 10 bp, synthetic construct
  misc_feature 1..10: note = intronic recognition element for splicing modifier (REMS)
  source 1..10: mol_type = other DNA
cagagtgcgg

SEQ ID NO: 3369 - DNA, 10 bp, synthetic construct
  misc_feature 1..10: note = intronic recognition element for splicing modifier (REMS)
  source 1..10: mol_type = other DNA
gagagtgcgg

SEQ ID NO: 3370 - DNA, 10 bp, synthetic construct
  misc_feature 1..10: note = intronic recognition element for splicing modifier (REMS)
  source 1..10: mol_type = other DNA
tagagtgcgg

SEQ ID NO: 3371-3372 - skipped (2 entries)

SEQ ID NO: 3373 - DNA, 10 bp, synthetic construct
  misc_feature 1..10: note = intronic recognition element for splicing modifier (REMS)
  source 1..10: mol_type = other DNA
acgagtgcgg

SEQ ID NO: 3374 - DNA, 10 bp, synthetic construct
  misc_feature 1..10: note = intronic recognition element for splicing modifier (REMS)
  source 1..10: mol_type = other DNA
ccgagtgcgg

SEQ ID NO: 3375 - DNA, 10 bp, synthetic construct
  misc_feature 1..10: note = intronic recognition element for splicing modifier (REMS)
  source 1..10: mol_type = other DNA
gcgagtgcgg

SEQ ID NO: 3376 - DNA, 10 bp, synthetic construct
  misc_feature 1..10: note = intronic recognition element for splicing modifier (REMS)
  source 1..10: mol_type = other DNA
tcgagtgcgg

SEQ ID NO: 3377-3378 - skipped (2 entries)

SEQ ID NO: 3379 - DNA, 10 bp, synthetic construct
  misc_feature 1..10: note = intronic recognition element for splicing modifier (REMS)
  source 1..10: mol_type = other DNA
aggagtgcgg

SEQ ID NO: 3380 - DNA, 10 bp, synthetic construct
  misc_feature 1..10: note = intronic recognition element for splicing modifier (REMS)
  source 1..10: mol_type = other DNA
cggagtgcgg

SEQ ID NO: 3381 - DNA, 10 bp, synthetic construct
  misc_feature 1..10: note = intronic recognition element for splicing modifier (REMS)
  source 1..10: mol_type = other DNA
gggagtgcgg

SEQ ID NO: 3382 - DNA, 10 bp, synthetic construct
  misc_feature 1..10: note = intronic recognition element for splicing modifier (REMS)
  source 1..10: mol_type = other DNA
tggagtgcgg

SEQ ID NO: 3383-3384 - skipped (2 entries)

SEQ ID NO: 3385 - DNA, 10 bp, synthetic construct
  misc_feature 1..10: note = intronic recognition element for splicing modifier (REMS)
  source 1..10: mol_type = other DNA
atgagtgcgg

SEQ ID NO: 3386 - DNA, 10 bp, synthetic construct
  misc_feature 1..10: note = intronic recognition element for splicing modifier (REMS)
  source 1..10: mol_type = other DNA
ctgagtgcgg

SEQ ID NO: 3387 - DNA, 10 bp, synthetic construct
  misc_feature 1..10: note = intronic recognition element for splicing modifier (REMS)
  source 1..10: mol_type = other DNA
gtgagtgcgg

SEQ ID NO: 3388 - DNA, 10 bp, synthetic construct
  misc_feature 1..10: note = intronic recognition element for splicing modifier (REMS)
  source 1..10: mol_type = other DNA
ttgagtgcgg

SEQ ID NO: 3389-3390 - skipped (2 entries)

SEQ ID NO: 3391 - DNA, 10 bp, synthetic construct
  misc_feature 1..10: note = intronic recognition element for splicing modifier (REMS)
  source 1..10: mol_type = other DNA
aagagtgggg

SEQ ID NO: 3392 - DNA, 10 bp, synthetic construct
  misc_feature 1..10: note = intronic recognition element for splicing modifier (REMS)
  source 1..10: mol_type = other DNA
cagagtgggg

SEQ ID NO: 3393 - DNA, 10 bp, synthetic construct
  misc_feature 1..10: note = intronic recognition element for splicing modifier (REMS)
  source 1..10: mol_type = other DNA
gagagtgggg

SEQ ID NO: 3394 - DNA, 10 bp, synthetic construct
  misc_feature 1..10: note = intronic recognition element for splicing modifier (REMS)
  source 1..10: mol_type = other DNA
tagagtgggg

SEQ ID NO: 3395-3396 - skipped (2 entries)

SEQ ID NO: 3397 - DNA, 10 bp, synthetic construct
  misc_feature 1..10: note = intronic recognition element for splicing modifier (REMS)
  source 1..10: mol_type = other DNA
acgagtgggg

SEQ ID NO: 3398 - DNA, 10 bp, synthetic construct
  misc_feature 1..10: note = intronic recognition element for splicing modifier (REMS)
  source 1..10: mol_type = other DNA
ccgagtgggg

SEQ ID NO: 3399 - DNA, 10 bp, synthetic construct
  misc_feature 1..10: note = intronic recognition element for splicing modifier (REMS)
  source 1..10: mol_type = other DNA
gcgagtgggg

SEQ ID NO: 3400 - DNA, 10 bp, synthetic construct
  misc_feature 1..10: note = intronic recognition element for splicing modifier (REMS)
  source 1..10: mol_type = other DNA
tcgagtgggg

SEQ ID NO: 3401-3402 - skipped (2 entries)

SEQ ID NO: 3403 - DNA, 10 bp, synthetic construct
  misc_feature 1..10: note = intronic recognition element for splicing modifier (REMS)
  source 1..10: mol_type = other DNA
aggagtgggg

SEQ ID NO: 3404 - DNA, 10 bp, synthetic construct
  misc_feature 1..10: note = intronic recognition element for splicing modifier (REMS)
  source 1..10: mol_type = other DNA
cggagtgggg

SEQ ID NO: 3405 - DNA, 10 bp, synthetic construct
  misc_feature 1..10: note = intronic recognition element for splicing modifier (REMS)
  source 1..10: mol_type = other DNA
gggagtgggg

SEQ ID NO: 3406 - DNA, 10 bp, synthetic construct
  misc_feature 1..10: note = intronic recognition element for splicing modifier (REMS)
  source 1..10: mol_type = other DNA
tggagtgggg

SEQ ID NO: 3407-3408 - skipped (2 entries)

SEQ ID NO: 3409 - DNA, 10 bp, synthetic construct
  misc_feature 1..10: note = intronic recognition element for splicing modifier (REMS)
  source 1..10: mol_type = other DNA
atgagtgggg

SEQ ID NO: 3410 - DNA, 10 bp, synthetic construct
  misc_feature 1..10: note = intronic recognition element for splicing modifier (REMS)
  source 1..10: mol_type = other DNA
ctgagtgggg

SEQ ID NO: 3411 - DNA, 10 bp, synthetic construct
  misc_feature 1..10: note = intronic recognition element for splicing modifier (REMS)
  source 1..10: mol_type = other DNA
gtgagtgggg

SEQ ID NO: 3412 - DNA, 10 bp, synthetic construct
  misc_feature 1..10: note = intronic recognition element for splicing modifier (REMS)
  source 1..10: mol_type = other DNA
ttgagtgggg

SEQ ID NO: 3413-3414 - skipped (2 entries)

SEQ ID NO: 3415 - DNA, 10 bp, synthetic construct
  misc_feature 1..10: note = intronic recognition element for splicing modifier (REMS)
  source 1..10: mol_type = other DNA
aagagtgtgg

SEQ ID NO: 3416 - DNA, 10 bp, synthetic construct
  misc_feature 1..10: note = intronic recognition element for splicing modifier (REMS)
  source 1..10: mol_type = other DNA
cagagtgtgg

SEQ ID NO: 3417 - DNA, 10 bp, synthetic construct
  misc_feature 1..10: note = intronic recognition element for splicing modifier (REMS)
  source 1..10: mol_type = other DNA
gagagtgtgg

SEQ ID NO: 3418 - DNA, 10 bp, synthetic construct
  misc_feature 1..10: note = intronic recognition element for splicing modifier (REMS)
  source 1..10: mol_type = other DNA
tagagtgtgg

SEQ ID NO: 3419-3420 - skipped (2 entries)

SEQ ID NO: 3421 - DNA, 10 bp, synthetic construct
  misc_feature 1..10: note = intronic recognition element for splicing modifier (REMS)
  source 1..10: mol_type = other DNA
acgagtgtgg

SEQ ID NO: 3422 - DNA, 10 bp, synthetic construct
  misc_feature 1..10: note = intronic recognition element for splicing modifier (REMS)
  source 1..10: mol_type = other DNA
ccgagtgtgg

SEQ ID NO: 3423 - DNA, 10 bp, synthetic construct
  misc_feature 1..10: note = intronic recognition element for splicing modifier (REMS)
  source 1..10: mol_type = other DNA
gcgagtgtgg

SEQ ID NO: 3424 - DNA, 10 bp, synthetic construct
  misc_feature 1..10: note = intronic recognition element for splicing modifier (REMS)
  source 1..10: mol_type = other DNA
tcgagtgtgg

SEQ ID NO: 3425-3426 - skipped (2 entries)

SEQ ID NO: 3427 - DNA, 10 bp, synthetic construct
  misc_feature 1..10: note = intronic recognition element for splicing modifier (REMS)
  source 1..10: mol_type = other DNA
aggagtgtgg

SEQ ID NO: 3428 - DNA, 10 bp, synthetic construct
  misc_feature 1..10: note = intronic recognition element for splicing modifier (REMS)
  source 1..10: mol_type = other DNA
cggagtgtgg

SEQ ID NO: 3429 - DNA, 10 bp, synthetic construct
  misc_feature 1..10: note = intronic recognition element for splicing modifier (REMS)
  source 1..10: mol_type = other DNA
gggagtgtgg

SEQ ID NO: 3430 - DNA, 10 bp, synthetic construct
  misc_feature 1..10: note = intronic recognition element for splicing modifier (REMS)
  source 1..10: mol_type = other DNA
tggagtgtgg

SEQ ID NO: 3431-3432 - skipped (2 entries)

SEQ ID NO: 3433 - DNA, 10 bp, synthetic construct
  misc_feature 1..10: note = intronic recognition element for splicing modifier (REMS)
  source 1..10: mol_type = other DNA
atgagtgtgg

SEQ ID NO: 3434 - DNA, 10 bp, synthetic construct
  misc_feature 1..10: note = intronic recognition element for splicing modifier (REMS)
  source 1..10: mol_type = other DNA
ctgagtgtgg

SEQ ID NO: 3435 - DNA, 10 bp, synthetic construct
  misc_feature 1..10: note = intronic recognition element for splicing modifier (REMS)
  source 1..10: mol_type = other DNA
gtgagtgtgg

SEQ ID NO: 3436 - DNA, 10 bp, synthetic construct
  misc_feature 1..10: note = intronic recognition element for splicing modifier (REMS)
  source 1..10: mol_type = other DNA
ttgagtgtgg

SEQ ID NO: 3437-3438 - skipped (2 entries)

SEQ ID NO: 3439 - DNA, 10 bp, synthetic construct
  misc_feature 1..10: note = intronic recognition element for splicing modifier (REMS)
  source 1..10: mol_type = other DNA
aagagtgagt

SEQ ID NO: 3440 - DNA, 10 bp, synthetic construct
  misc_feature 1..10: note = intronic recognition element for splicing modifier (REMS)
  source 1..10: mol_type = other DNA
cagagtgagt

SEQ ID NO: 3441 - DNA, 10 bp, synthetic construct
  misc_feature 1..10: note = intronic recognition element for splicing modifier (REMS)
  source 1..10: mol_type = other DNA
gagagtgagt

SEQ ID NO: 3442 - DNA, 10 bp, synthetic construct
  misc_feature 1..10: note = intronic recognition element for splicing modifier (REMS)
  source 1..10: mol_type = other DNA
tagagtgagt

SEQ ID NO: 3443-3444 - skipped (2 entries)

SEQ ID NO: 3445 - DNA, 10 bp, synthetic construct
  misc_feature 1..10: note = intronic recognition element for splicing modifier (REMS)
  source 1..10: mol_type = other DNA
acgagtgagt

SEQ ID NO: 3446 - DNA, 10 bp, synthetic construct
  misc_feature 1..10: note = intronic recognition element for splicing modifier (REMS)
  source 1..10: mol_type = other DNA
ccgagtgagt

SEQ ID NO: 3447 - DNA, 10 bp, synthetic construct
  misc_feature 1..10: note = intronic recognition element for splicing modifier (REMS)
  source 1..10: mol_type = other DNA
gcgagtgagt

SEQ ID NO: 3448 - DNA, 10 bp, synthetic construct
  misc_feature 1..10: note = intronic recognition element for splicing modifier (REMS)
  source 1..10: mol_type = other DNA
tcgagtgagt

SEQ ID NO: 3449-3450 - skipped (2 entries)

SEQ ID NO: 3451 - DNA, 10 bp, synthetic construct
  misc_feature 1..10: note = intronic recognition element for splicing modifier (REMS)
  source 1..10: mol_type = other DNA
aggagtgagt

SEQ ID NO: 3452 - DNA, 10 bp, synthetic construct
  misc_feature 1..10: note = intronic recognition element for splicing modifier (REMS)
  source 1..10: mol_type = other DNA
cggagtgagt

SEQ ID NO: 3453 - DNA, 10 bp, synthetic construct
  misc_feature 1..10: note = intronic recognition element for splicing modifier (REMS)
  source 1..10: mol_type = other DNA
gggagtgagt

SEQ ID NO: 3454 - DNA, 10 bp, synthetic construct
  misc_feature 1..10: note = intronic recognition element for splicing modifier (REMS)
  source 1..10: mol_type = other DNA
tggagtgagt

SEQ ID NO: 3455-3456 - skipped (2 entries)

SEQ ID NO: 3457 - DNA, 10 bp, synthetic construct
  misc_feature 1..10: note = intronic recognition element for splicing modifier (REMS)
  source 1..10: mol_type = other DNA
atgagtgagt

SEQ ID NO: 3458 - DNA, 10 bp, synthetic construct
  misc_feature 1..10: note = intronic recognition element for splicing modifier (REMS)
  source 1..10: mol_type = other DNA
ctgagtgagt

SEQ ID NO: 3459 - DNA, 10 bp, synthetic construct
  misc_feature 1..10: note = intronic recognition element for splicing modifier (REMS)
  source 1..10: mol_type = other DNA
gtgagtgagt

SEQ ID NO: 3460 - DNA, 10 bp, synthetic construct
  misc_feature 1..10: note = intronic recognition element for splicing modifier (REMS)
  source 1..10: mol_type = other DNA
ttgagtgagt

SEQ ID NO: 3461-3462 - skipped (2 entries)

SEQ ID NO: 3463 - DNA, 10 bp, synthetic construct
  misc_feature 1..10: note = intronic recognition element for splicing modifier (REMS)
  source 1..10: mol_type = other DNA
aagagtgcgt

SEQ ID NO: 3464 - DNA, 10 bp, synthetic construct
  misc_feature 1..10: note = intronic recognition element for splicing modifier (REMS)
  source 1..10: mol_type = other DNA
cagagtgcgt

SEQ ID NO: 3465 - DNA, 10 bp, synthetic construct
  misc_feature 1..10: note = intronic recognition element for splicing modifier (REMS)
  source 1..10: mol_type = other DNA
gagagtgcgt

SEQ ID NO: 3466 - DNA, 10 bp, synthetic construct
  misc_feature 1..10: note = intronic recognition element for splicing modifier (REMS)
  source 1..10: mol_type = other DNA
tagagtgcgt

SEQ ID NO: 3467-3468 - skipped (2 entries)

SEQ ID NO: 3469 - DNA, 10 bp, synthetic construct
  misc_feature 1..10: note = intronic recognition element for splicing modifier (REMS)
  source 1..10: mol_type = other DNA
acgagtgcgt

SEQ ID NO: 3470 - DNA, 10 bp, synthetic construct
  misc_feature 1..10: note = intronic recognition element for splicing modifier (REMS)
  source 1..10: mol_type = other DNA
ccgagtgcgt

SEQ ID NO: 3471 - DNA, 10 bp, synthetic construct
  misc_feature 1..10: note = intronic recognition element for splicing modifier (REMS)
  source 1..10: mol_type = other DNA
gcgagtgcgt

SEQ ID NO: 3472 - DNA, 10 bp, synthetic construct
  misc_feature 1..10: note = intronic recognition element for splicing modifier (REMS)
  source 1..10: mol_type = other DNA
tcgagtgcgt

SEQ ID NO: 3473-3474 - skipped (2 entries)

SEQ ID NO: 3475 - DNA, 10 bp, synthetic construct
  misc_feature 1..10: note = intronic recognition element for splicing modifier (REMS)
  source 1..10: mol_type = other DNA
aggagtgcgt

SEQ ID NO: 3476 - DNA, 10 bp, synthetic construct
  misc_feature 1..10: note = intronic recognition element for splicing modifier (REMS)
  source 1..10: mol_type = other DNA
cggagtgcgt

SEQ ID NO: 3477 - DNA, 10 bp, synthetic construct
  misc_feature 1..10: note = intronic recognition element for splicing modifier (REMS)
  source 1..10: mol_type = other DNA
gggagtgcgt

SEQ ID NO: 3478 - DNA, 10 bp, synthetic construct
  misc_feature 1..10: note = intronic recognition element for splicing modifier (REMS)
  source 1..10: mol_type = other DNA
tggagtgcgt

SEQ ID NO: 3479-3480 - skipped (2 entries)

SEQ ID NO: 3481 - DNA, 10 bp, synthetic construct
  misc_feature 1..10: note = intronic recognition element for splicing modifier (REMS)
  source 1..10: mol_type = other DNA
atgagtgcgt

SEQ ID NO: 3482 - DNA, 10 bp, synthetic construct
  misc_feature 1..10: note = intronic recognition element for splicing modifier (REMS)
  source 1..10: mol_type = other DNA
ctgagtgcgt

SEQ ID NO: 3483 - DNA, 10 bp, synthetic construct
  misc_feature 1..10: note = intronic recognition element for splicing modifier (REMS)
  source 1..10: mol_type = other DNA
gtgagtgcgt

SEQ ID NO: 3484 - DNA, 10 bp, synthetic construct
  misc_feature 1..10: note = intronic recognition element for splicing modifier (REMS)
  source 1..10: mol_type = other DNA
ttgagtgcgt

SEQ ID NO: 3485-3486 - skipped (2 entries)

SEQ ID NO: 3487 - DNA, 10 bp, synthetic construct
  misc_feature 1..10: note = intronic recognition element for splicing modifier (REMS)
  source 1..10: mol_type = other DNA
aagagtgggt

SEQ ID NO: 3488 - DNA, 10 bp, synthetic construct
  misc_feature 1..10: note = intronic recognition element for splicing modifier (REMS)
  source 1..10: mol_type = other DNA
cagagtgggt

SEQ ID NO: 3489 - DNA, 10 bp, synthetic construct
  misc_feature 1..10: note = intronic recognition element for splicing modifier (REMS)
  source 1..10: mol_type = other DNA
gagagtgggt

SEQ ID NO: 3490 - DNA, 10 bp, synthetic construct
  misc_feature 1..10: note = intronic recognition element for splicing modifier (REMS)
  source 1..10: mol_type = other DNA
tagagtgggt

SEQ ID NO: 3491-3492 - skipped (2 entries)

SEQ ID NO: 3493 - DNA, 10 bp, synthetic construct
  misc_feature 1..10: note = intronic recognition element for splicing modifier (REMS)
  source 1..10: mol_type = other DNA
acgagtgggt

SEQ ID NO: 3494 - DNA, 10 bp, synthetic construct
  misc_feature 1..10: note = intronic recognition element for splicing modifier (REMS)
  source 1..10: mol_type = other DNA
ccgagtgggt

SEQ ID NO: 3495 - DNA, 10 bp, synthetic construct
  misc_feature 1..10: note = intronic recognition element for splicing modifier (REMS)
  source 1..10: mol_type = other DNA
gcgagtgggt

SEQ ID NO: 3496 - DNA, 10 bp, synthetic construct
  misc_feature 1..10: note = intronic recognition element for splicing modifier (REMS)
  source 1..10: mol_type = other DNA
tcgagtgggt

SEQ ID NO: 3497-3498 - skipped (2 entries)

SEQ ID NO: 3499 - DNA, 10 bp, synthetic construct
  misc_feature 1..10: note = intronic recognition element for splicing modifier (REMS)
  source 1..10: mol_type = other DNA
aggagtgggt

SEQ ID NO: 3500 - DNA, 10 bp, synthetic construct
  misc_feature 1..10: note = intronic recognition element for splicing modifier (REMS)
  source 1..10: mol_type = other DNA
cggagtgggt

SEQ ID NO: 3501 - DNA, 10 bp, synthetic construct
  misc_feature 1..10: note = intronic recognition element for splicing modifier (REMS)
  source 1..10: mol_type = other DNA
gggagtgggt

SEQ ID NO: 3502 - DNA, 10 bp, synthetic construct
  misc_feature 1..10: note = intronic recognition element for splicing modifier (REMS)
  source 1..10: mol_type = other DNA
tggagtgggt

SEQ ID NO: 3503-3504 - skipped (2 entries)

SEQ ID NO: 3505 - DNA, 10 bp, synthetic construct
  misc_feature 1..10: note = intronic recognition element for splicing modifier (REMS)
  source 1..10: mol_type = other DNA
atgagtgggt

SEQ ID NO: 3506 - DNA, 10 bp, synthetic construct
  misc_feature 1..10: note = intronic recognition element for splicing modifier (REMS)
  source 1..10: mol_type = other DNA
ctgagtgggt

SEQ ID NO: 3507 - DNA, 10 bp, synthetic construct
  misc_feature 1..10: note = intronic recognition element for splicing modifier (REMS)
  source 1..10: mol_type = other DNA
gtgagtgggt

SEQ ID NO: 3508 - DNA, 10 bp, synthetic construct
  misc_feature 1..10: note = intronic recognition element for splicing modifier (REMS)
  source 1..10: mol_type = other DNA
ttgagtgggt

SEQ ID NO: 3509-3510 - skipped (2 entries)

SEQ ID NO: 3511 - DNA, 10 bp, synthetic construct
  misc_feature 1..10: note = intronic recognition element for splicing modifier (REMS)
  source 1..10: mol_type = other DNA
aagagtgtgt

SEQ ID NO: 3512 - DNA, 10 bp, synthetic construct
  misc_feature 1..10: note = intronic recognition element for splicing modifier (REMS)
  source 1..10: mol_type = other DNA
cagagtgtgt

SEQ ID NO: 3513 - DNA, 10 bp, synthetic construct
  misc_feature 1..10: note = intronic recognition element for splicing modifier (REMS)
  source 1..10: mol_type = other DNA
gagagtgtgt

SEQ ID NO: 3514 - DNA, 10 bp, synthetic construct
  misc_feature 1..10: note = intronic recognition element for splicing modifier (REMS)
  source 1..10: mol_type = other DNA
tagagtgtgt

SEQ ID NO: 3515-3516 - skipped (2 entries)

SEQ ID NO: 3517 - DNA, 10 bp, synthetic construct
  misc_feature 1..10: note = intronic recognition element for splicing modifier (REMS)
  source 1..10: mol_type = other DNA
acgagtgtgt

SEQ ID NO: 3518 - DNA, 10 bp, synthetic construct
  misc_feature 1..10: note = intronic recognition element for splicing modifier (REMS)
  source 1..10: mol_type = other DNA
ccgagtgtgt

SEQ ID NO: 3519 - DNA, 10 bp, synthetic construct
  misc_feature 1..10: note = intronic recognition element for splicing modifier (REMS)
  source 1..10: mol_type = other DNA
gcgagtgtgt

SEQ ID NO: 3520 - DNA, 10 bp, synthetic construct
  misc_feature 1..10: note = intronic recognition element for splicing modifier (REMS)
  source 1..10: mol_type = other DNA
tcgagtgtgt

SEQ ID NO: 3521-3522 - skipped (2 entries)

SEQ ID NO: 3523 - DNA, 10 bp, synthetic construct
  misc_feature 1..10: note = intronic recognition element for splicing modifier (REMS)
  source 1..10: mol_type = other DNA
aggagtgtgt

SEQ ID NO: 3524 - DNA, 10 bp, synthetic construct
  misc_feature 1..10: note = intronic recognition element for splicing modifier (REMS)
  source 1..10: mol_type = other DNA
cggagtgtgt

SEQ ID NO: 3525 - DNA, 10 bp, synthetic construct
  misc_feature 1..10: note = intronic recognition element for splicing modifier (REMS)
  source 1..10: mol_type = other DNA
gggagtgtgt

SEQ ID NO: 3526 - DNA, 10 bp, synthetic construct
  misc_feature 1..10: note = intronic recognition element for splicing modifier (REMS)
  source 1..10: mol_type = other DNA
tggagtgtgt

SEQ ID NO: 3527-3528 - skipped (2 entries)

SEQ ID NO: 3529 - DNA, 10 bp, synthetic construct
  misc_feature 1..10: note = intronic recognition element for splicing modifier (REMS)
  source 1..10: mol_type = other DNA
atgagtgtgt

SEQ ID NO: 3530 - DNA, 10 bp, synthetic construct
  misc_feature 1..10: note = intronic recognition element for splicing modifier (REMS)
  source 1..10: mol_type = other DNA
ctgagtgtgt

SEQ ID NO: 3531 - DNA, 10 bp, synthetic construct
  misc_feature 1..10: note = intronic recognition element for splicing modifier (REMS)
  source 1..10: mol_type = other DNA
gtgagtgtgt

SEQ ID NO: 3532 - DNA, 10 bp, synthetic construct
  misc_feature 1..10: note = intronic recognition element for splicing modifier (REMS)
  source 1..10: mol_type = other DNA
ttgagtgtgt

SEQ ID NO: 3533-3628 - skipped (96 entries)

SEQ ID NO: 3629 - DNA, 20 bp, synthetic construct
  misc_feature 1..20: note = forward primer ABCB_54-73
  source 1..20: mol_type = other DNA
gccggcggctcctgttttac

SEQ ID NO: 3630 - DNA, 20 bp, synthetic construct
  misc_feature 1..20: note = forward primer ANXA_101-120
  source 1..20: mol_type = other DNA
agtcgctgtaccacgacatc

SEQ ID NO: 3631 - DNA, 20 bp, synthetic construct
  misc_feature 1..20: note = forward primer ARL1_87-106-1a-KE
  source 1..20: mol_type = other DNA
gctgccggatgtctgatctc

SEQ ID NO: 3632 - DNA, 21 bp, synthetic construct
  misc_feature 1..21: note = forward primer DECA_23-43-KE
  source 1..21: mol_type = other DNA
tgctgtaccttgcagtgttcc

SEQ ID NO: 3633 - DNA, 20 bp, synthetic construct
  misc_feature 1..20: note = forward primer DHFR_5-24
  source 1..20: mol_type = other DNA
ccatgaatcacccaggccat

SEQ ID NO: 3634 - DNA, 21 bp, synthetic construct
  misc_feature 1..21: note = forward primer FAIM_197-217-KE
  source 1..21: mol_type = other DNA
gtgaaacctaccccagagcct

SEQ ID NO: 3635 - DNA, 21 bp, synthetic construct
  misc_feature 1..21: note = forward primer GXYL_57-77
  source 1..21: mol_type = other DNA
ggaagcaattgccaagaagca

SEQ ID NO: 3636 - DNA, 20 bp, synthetic construct
  misc_feature 1..20: note = forward primer HTT_E49_For
  source 1..20: mol_type = other DNA
tgcccagtcatttgcacctt

SEQ ID NO: 3637 - DNA, 20 bp, synthetic construct
  misc_feature 1..20: note = forward primer MADD_137-156-KE
  source 1..20: mol_type = other DNA
tgccacaggaaagggtccta

SEQ ID NO: 3638 - DNA, 20 bp, synthetic construct
  misc_feature 1..20: note = forward primer MEMO_37-56
  source 1..20: mol_type = other DNA
tggagctctgagtgagtcaa

SEQ ID NO: 3639 - DNA, 21 bp, synthetic construct
  misc_feature 1..21: note = forward primer OXCT_55-75-KE
  source 1..21: mol_type = other DNA
ggcctgacagtggatgacgta

SEQ ID NO: 3640 - DNA, 20 bp, synthetic construct
  misc_feature 1..20: note = forward primer PAPD_46-65-KE
  source 1..20: mol_type = other DNA
cccggagcagtgatggtgat

SEQ ID NO: 3641 - DNA, 20 bp, synthetic construct
  misc_feature 1..20: note = forward primer PDXD_23-42
  source 1..20: mol_type = other DNA
tgtgccgtgtaccctgtaac

SEQ ID NO: 3642 - DNA, 24 bp, synthetic construct
  misc_feature 1..24: note = forward primer PMS1_104-127-KE
  source 1..24: mol_type = other DNA
tctcctcatgagctttggtatcct

SEQ ID NO: 3643 - DNA, 24 bp, synthetic construct
  misc_feature 1..24: note = forward primer PPIP_34-57-KE
  source 1..24: mol_type = other DNA
tcagttgacctatctccctcatgg

SEQ ID NO: 3644 - DNA, 19 bp, synthetic construct
  misc_feature 1..19: note = forward primer PPP1R26e3F1
  source 1..19: mol_type = other DNA
cgtgtgggaacactggctg

SEQ ID NO: 3645 - DNA, 20 bp, synthetic construct
  misc_feature 1..20: note = forward primer RPRF_50-69-KE
  source 1..20: mol_type = other DNA
gccaaccgtatgagcttcgg

SEQ ID NO: 3646 - DNA, 24 bp, synthetic construct
  misc_feature 1..24: note = forward primer RARS_30-53-KE
  source 1..24: mol_type = other DNA
ttggacatttgcgttctaccatca

SEQ ID NO: 3647 - DNA, 24 bp, synthetic construct
  misc_feature 1..24: note = forward primer TNS3_6-29-KE
  source 1..24: mol_type = other DNA
ccaggtgataaacttgtgatcgtg

SEQ ID NO: 3648 - DNA, 23 bp, synthetic construct
  misc_feature 1..23: note = forward primer Wnk1_45-67
  source 1..23: mol_type = other DNA
gctggtgtttttaagatgggacg

SEQ ID NO: 3649 - DNA, 21 bp, synthetic construct
  misc_feature 1..21: note = forward primer SF3B_107-127-2a
  source 1..21: mol_type = other DNA
ggcatcagctttgccattcat

SEQ ID NO: 3650 - DNA, 20 bp, synthetic construct
  misc_feature 1..20: note = forward primer SF3B_134-153-9a
  source 1..20: mol_type = other DNA
ttggacagcctctctcccat

SEQ ID NO: 3651 - DNA, 20 bp, synthetic construct
  misc_feature 1..20: note = forward primer MEMO_37-56
  source 1..20: mol_type = other DNA
tggagctctgagtgagtcaa

SEQ ID NO: 3652 - DNA, 20 bp, synthetic construct
  misc_feature 1..20: note = forward primer DHFR_5-24
  source 1..20: mol_type = other DNA
ccatgaatcacccaggccat

SEQ ID NO: 3653 - DNA, 25 bp, synthetic construct
  misc_feature 1..25: note = forward primer GCFC2e2F1
  source 1..25: mol_type = other DNA
ggagaaaaagaactttcatcaacag

SEQ ID NO: 3654 - DNA, 24 bp, synthetic construct
  misc_feature 1..24: note = forward primer FAM174Ae2F1
  source 1..24: mol_type = other DNA
caggatgatgaggatgatgacaac

SEQ ID NO: 3655 - DNA, 29 bp, synthetic construct
  misc_feature 1..29: note = forward primer SOS2e19F1
  source 1..29: mol_type = other DNA
ctgaaaaagagtttacagattatttgttc

SEQ ID NO: 3656 - DNA, 25 bp, synthetic construct
  misc_feature 1..25: note = forward primer COPS7Be2F1
  source 1..25: mol_type = other DNA
cggagtgtatgtctttggagaactt

SEQ ID NO: 3657 - DNA, 27 bp, synthetic construct
  misc_feature 1..27: note = forward primer LMBRD2e16R1
  source 1..27: mol_type = other DNA
ggaatcttctctattgtgtccataacg

SEQ ID NO: 3658 - DNA, 22 bp, synthetic construct
  misc_feature 1..22: note = forward primer ASAP1e11F1
  source 1..22: mol_type = other DNA
taccccttcttttcactgccat

SEQ ID NO: 3659 - DNA, 19 bp, synthetic construct
  misc_feature 1..19: note = forward primer PPP1R26e3F1
  source 1..19: mol_type = other DNA
cgtgtgggaacactggctg

SEQ ID NO: 3660 - DNA, 24 bp, synthetic construct
  misc_feature 1..24: note = forward primer NT5C2e12F1
  source 1..24: mol_type = other DNA
aaaccactcttttttggagaaggc

SEQ ID NO: 3661 - DNA, 26 bp, synthetic construct
  misc_feature 1..26: note = forward primer ELMO2e2F1
  source 1..26: mol_type = other DNA
aggtgtagaaagaggtacatggagaa

SEQ ID NO: 3662 - DNA, 20 bp, synthetic construct
  misc_feature 1..20: note = reverse primer ABCB_235-254
  source 1..20: mol_type = other DNA
aggagctgcggtagccatca

SEQ ID NO: 3663 - DNA, 20 bp, synthetic construct
  misc_feature 1..20: note = reverse primer ANXA_302-321
  source 1..20: mol_type = other DNA
gagccaccagtcactgttca

SEQ ID NO: 3664 - DNA, 20 bp, synthetic construct
  misc_feature 1..20: note = reverse primer ARL1_392-411-1a-KE
  source 1..20: mol_type = other DNA
tgaggcctatgcaaaccagg

SEQ ID NO: 3665 - DNA, 23 bp, synthetic construct
  misc_feature 1..23: note = reverse primer DECA_168-190-KE
  source 1..23: mol_type = other DNA
ccatgagacaaggtagcatctgt

SEQ ID NO: 3666 - DNA, 20 bp, synthetic construct
  misc_feature 1..20: note = reverse primer DHFR_209-228
  source 1..20: mol_type = other DNA
tgcctttctcctcctggaca

SEQ ID NO: 3667 - DNA, 22 bp, synthetic construct
  misc_feature 1..22: note = reverse primer FAIM_367-388-KE
  source 1..22: mol_type = other DNA
agcaacatcccaaacagctacg

SEQ ID NO: 3668 - DNA, 23 bp, synthetic construct
  misc_feature 1..23: note = reverse primer GXYL_246-268
  source 1..23: mol_type = other DNA
aggaacggatgttgtcatcttca

SEQ ID NO: 3669 - DNA, 20 bp, synthetic construct
  misc_feature 1..20: note = reverse primer HTT_E51_Rev
  source 1..20: mol_type = other DNA
gggtatttgtccttctttct

SEQ ID NO: 3670 - DNA, 22 bp, synthetic construct
  misc_feature 1..22: note = reverse primer MADD_288-309-KE
  source 1..22: mol_type = other DNA
tctcctctgtctcaccaaggtc

SEQ ID NO: 3671 - DNA, 22 bp, synthetic construct
  misc_feature 1..22: note = reverse primer MEMO_218-239
  source 1..22: mol_type = other DNA
tccccctgggattcatcatagt

SEQ ID NO: 3672 - DNA, 21 bp, synthetic construct
  misc_feature 1..21: note = reverse primer OXCT_236-256-KE
  source 1..21: mol_type = other DNA
aatgaaaaacacgcagcctgg

SEQ ID NO: 3673 - DNA, 23 bp, synthetic construct
  misc_feature 1..23: note = reverse primer PAPD_183-205-KE
  source 1..23: mol_type = other DNA
aaggtgagtatatgccgtgcttc

SEQ ID NO: 3674 - DNA, 21 bp, synthetic construct
  misc_feature 1..21: note = reverse primer PDXD_179-199
  source 1..21: mol_type = other DNA
caagcaacaggggcagtcttc

SEQ ID NO: 3675 - DNA, 24 bp, synthetic construct
  misc_feature 1..24: note = reverse primer PMS1_285-308-KE
  source 1..24: mol_type = other DNA
acatgagagccatcttgtgatctg

SEQ ID NO: 3676 - DNA, 24 bp, synthetic construct
  misc_feature 1..24: note = reverse primer PPIP_149-172-KE
  source 1..24: mol_type = other DNA
ttcacctccccattttagaaccaa

SEQ ID NO: 3677 - DNA, 22 bp, synthetic construct
  misc_feature 1..22: note = reverse primer PPP1R26e4R1
  source 1..22: mol_type = other DNA
gcgatgctttatttctctaccg

SEQ ID NO: 3678 - DNA, 20 bp, synthetic construct
  misc_feature 1..20: note = reverse primer RPRF_218-237-KE
  source 1..20: mol_type = other DNA
tcgtttacctgtgtctgccg

SEQ ID NO: 3679 - DNA, 20 bp, synthetic construct
  misc_feature 1..20: note = reverse primer RARS_251-270-KE
  source 1..20: mol_type = other DNA
atgccccaatcgccaaggta

SEQ ID NO: 3680 - DNA, 21 bp, synthetic construct
  misc_feature 1..21: note = reverse primer TNS3_96-116-KE
  source 1..21: mol_type = other DNA
cggctccttgtccttcaacat

SEQ ID NO: 3681 - DNA, 21 bp, synthetic construct
  misc_feature 1..21: note = reverse primer Wnk1_187-207
  source 1..21: mol_type = other DNA
ctgaggactctgaggtgctgg

SEQ ID NO: 3682 - DNA, 20 bp, synthetic construct
  misc_feature 1..20: note = reverse primer SF3B_256-275-2a
  source 1..20: mol_type = other DNA
gtactttgccagtgttgggg

SEQ ID NO: 3683 - DNA, 21 bp, synthetic construct
  misc_feature 1..21: note = reverse primer SF3B_304-324-9a
  source 1..21: mol_type = other DNA
actctcagagatgatcggggt

SEQ ID NO: 3684 - DNA, 22 bp, synthetic construct
  misc_feature 1..22: note = reverse primer MEMO_218-239
  source 1..22: mol_type = other DNA
tccccctgggattcatcatagt

SEQ ID NO: 3685 - DNA, 20 bp, synthetic construct
  misc_feature 1..20: note = reverse primer DHFR_209-228
  source 1..20: mol_type = other DNA
tgcctttctcctcctggaca

SEQ ID NO: 3686 - DNA, 23 bp, synthetic construct
  misc_feature 1..23: note = reverse primer GCFC2e3R1
  source 1..23: mol_type = other DNA
gaataaaagctgcatctgggatc

SEQ ID NO: 3687 - DNA, 27 bp, synthetic construct
  misc_feature 1..27: note = reverse primer FAM174Ae3R1
  source 1..27: mol_type = other DNA
caacattgatatagtggcttcttattc

SEQ ID NO: 3688 - DNA, 24 bp, synthetic construct
  misc_feature 1..24: note = reverse primer SOS2e20R1
  source 1..24: mol_type = other DNA
ctgaagaagcagatactggtggag

SEQ ID NO: 3689 - DNA, 24 bp, synthetic construct
  misc_feature 1..24: note = reverse primer COPS7Be3R1
  source 1..24: mol_type = other DNA
gtatgtcccataggcaaacaggtt

SEQ ID NO: 3690 - DNA, 24 bp, synthetic construct
  misc_feature 1..24: note = reverse primer LMBRD2e15F1
  source 1..24: mol_type = other DNA
aaaggcaagaagaaggtgaaaatc

SEQ ID NO: 3691 - DNA, 24 bp, synthetic construct
  misc_feature 1..24: note = reverse primer ASAP1e12R1
  source 1..24: mol_type = other DNA
gctaactgcactccgagacttaat

SEQ ID NO: 3692 - DNA, 22 bp, synthetic construct
  misc_feature 1..22: note = reverse primer PPP1R26e4R1
  source 1..22: mol_type = other DNA
gcgatgctttatttctctaccg

SEQ ID NO: 3693 - DNA, 23 bp, synthetic construct
  misc_feature 1..23: note = reverse primer NT5C2e13R1
  source 1..23: mol_type = other DNA
tagacgataccatgctgtagggg

SEQ ID NO: 3694 - DNA, 21 bp, synthetic construct
  misc_feature 1..21: note = reverse primer ELMO_232-252
  source 1..21: mol_type = other DNA
ttgataatggatgccaggggc

SEQ ID NO: 3695 - DNA, 120 bp, synthetic construct
  misc_feature 1..120: note = iExon produced in gene ABCC3
  source 1..120: mol_type = other DNA
ggcccataggaaggacgcaaaggcctgtgtgtgcaggccagaaaaaggctatccacacagggtggccaggacactttctcctgtaaggaagggatgcaccagccaggcctgaaagaatga

SEQ ID NO: 3696 - DNA, 66 bp, synthetic construct
  misc_feature 1..66: note = iExon produced in gene ADCY3
  source 1..66: mol_type = other DNA
cggatcaaagattgaagaaagattgtactcctgtgtcgtggctccaacactgaggctgagatggga

SEQ ID NO: 3697 - DNA, 63 bp, synthetic construct
  misc_feature 1..63: note = iExon produced in gene AGPAT4
  source 1..63: mol_type = other DNA
gatactgcagccatcagcagacaatcaatgcaatcatctcagactgtgtcctgcgtcccagga

SEQ ID NO: 3698 - DNA, 133 bp, synthetic construct
  misc_feature 1..133: note = iExon produced in gene ANKRA2
  source 1..133: mol_type = other DNA
aagtactgtcagctttgaaggagaaggcttcatggaggagctgtgacttgactccagagtgaaaggataattaggattgatacaggacggaggaaggaaggcatccaggcaatctcaataaaagcatccatga

SEQ ID NO: 3699 - DNA, 121 bp, synthetic construct
  misc_feature 1..121: note = iExon produced in gene ANXA11
  source 1..121: mol_type = other DNA
agtatctcctgcatgccagcaagctatggacatctggaagaagccacatgccttgccctcaagttgcttagggtggaaggaaatgattagaaatgagccaagccgagcctgcactcttaga

SEQ ID NO: 3700 - DNA, 141 bp, synthetic construct
  misc_feature 1..141: note = iExon produced in gene APIP
  source 1..141: mol_type = other DNA
ctctgaaattaaatccctactgactggcccttgaactgattttttctaacatcagcaaaagtcaaggagtgtttccctaaaaaagaaagcatttactcagaaaccgtatattgaagtccaggctgaaaaatgcaaacatga

SEQ ID NO: 3701 - DNA, 276 bp, synthetic construct
  misc_feature 1..276: note = iExon produced in gene APPL2
  source 1..276: mol_type = other DNA
tcagggctgtacgctgtggaccaaagatcatgctcgctgatgagagccaccctgctggtgacctcagtgctgccgacccatttacatcccagccctgccacattcctacagtgggaggttgaacacatttcttaaccttgatgagcctcagtttcatcatcagtaaaatgaagttaatggaaccatggaatctaccttggagagttgctagaagaattaaatgaagtcacatatgtttagtgcccagcacagcgtccagcacataggtggtacaga

SEQ ID NO: 3702 - DNA, 49 bp, synthetic construct
  misc_feature 1..49: note = iExon produced in gene ARHGAP1
  source 1..49: mol_type = other DNA
ggccgtcaacctttccaccttgaaactggtgtcaggagcaccctgcaga

SEQ ID NO: 3703 - DNA, 82 bp, synthetic construct
  misc_feature 1..82: note = iExon produced in gene ASAP1
  source 1..82: mol_type = other DNA
gttgttgcagctgcgcacctgctctgtgaagcacagattgtcatgggggcagttctctcaaaaacatggcatattgtgatga

SEQ ID NO: 3704 - DNA, 179 bp, synthetic construct
  misc_feature 1..179: note = iExon produced in gene ASAP1
  source 1..179: mol_type = other DNA
agcaaaccccattgtcaggggaaagcagaacaaagaaaagtatttagaaatgtatttccgggatgcacagattcttttcaccctcaccttcccctaggttgttgcagctgcgcacctgctctgtgaagcacagattgtcatgggggcagttctctcaaaaacatggcatattgtgatga

SEQ ID NO: 3705 - skipped

SEQ ID NO: 3706 - DNA, 16 bp, synthetic construct
  misc_feature 1..16: note = iExon produced in gene ASAP1
  source 1..16: mol_type = other DNA
atcgaagtctaggaga

SEQ ID NO: 3707 - DNA, 58 bp, synthetic construct
  misc_feature 1..58: note = iExon produced in gene ASPH
  source 1..58: mol_type = other DNA
tcattctgatctactgaaattccccagttcagactccattgaaagccctgggatggca

SEQ ID NO: 3708 - DNA, 174 bp, synthetic construct
  misc_feature 1..174: note = iExon produced in gene ATAD2B
  source 1..174: mol_type = other DNA
gtcatctgagcaaatgtaatcactcatctacccacaaaatggctaaatgacttaattcaactccctttgttgatttgcctgttagtttgtttatctggtggtctatctattaaatgtttattgagtacctgcagtgccagatgctgtgctgggtgtttggaatgcaaaaaatga

SEQ ID NO: 3709 - DNA, 99 bp, synthetic construct
  misc_feature 1..99: note = iExon produced in gene ATXN1
  source 1..99: mol_type = other DNA
tttcataaagaggacagacgctaaggcaattgtgtggaacagagcagcttctcggggtaaccatctcctgctgatgtataaatatcggggcaaaactga

SEQ ID NO: 3710 - DNA, 39 bp, synthetic construct
  misc_feature 1..39: note = iExon produced in gene BECN1
  source 1..39: mol_type = other DNA
gatcccattgatggatggaaactctagtttttacttaga

SEQ ID NO: 3711 - DNA, 88 bp, synthetic construct
  misc_feature 1..88: note = iExon produced in gene BHMT2
  source 1..88: mol_type = other DNA
gatgttttcatctggcccaagaagaacttgttcttaatgttaaaagacctttttgctaaactgggaagaaagtgctggaataacaaga

SEQ ID NO: 3712 - DNA, 92 bp, synthetic construct
  misc_feature 1..92: note = iExon produced in gene BICD1
  source 1..92: mol_type = other DNA
gtcaatttctgccttgtggataattttctgaatctgtaatatttctgaagattcctccaagtatttacagaacatacagaagtattttatga

SEQ ID NO: 3713 - DNA, 93 bp, synthetic construct
  misc_feature 1..93: note = iExon produced in gene BTN3A1
  source 1..93: mol_type = other DNA
atcttgttctcagaggccattcccagacccacagcaagagggattatggctgcaggcctcatgctcctttgttttggaagaaactgttgagga

SEQ ID NO: 3714 - DNA, 90 bp, synthetic construct
  misc_feature 1..90: note = iExon produced in gene C11orf30
  source 1..90: mol_type = other DNA
gccttgttcaaagctctgggcatctagcaatgagtaagatagtcaagatctgtgctctgtccacgttctcttggagcttacattttaaga

SEQ ID NO: 3715 - DNA, 164 bp, synthetic construct
  misc_feature 1..164: note = iExon produced in gene C11orf73
  source 1..164: mol_type = other DNA
gtaattattgaacatctacttgctgcctactttcaacatctgcatgtgtgtgtgaatattaaatatcacaccaagacattgttcagaggagacagaatagtgagctgagataaatgagaatctctctatggaagattagactggagcatgaacttgaaatatga

SEQ ID NO: 3716 - DNA, 93 bp, synthetic construct
  misc_feature 1..93: note = iExon produced in gene C14orf132
  source 1..93: mol_type = other DNA
aacaaagacaaatcccggatttctccatcagtctgtgaccctagagaagacccagagctggctccagggaagggctgcgtttggcctgggaga

SEQ ID NO: 3717 - DNA, 68 bp, synthetic construct
  misc_feature 1..68: note = iExon produced in gene C8orf88
  source 1..68: mol_type = other DNA
tgttccctttcaactttcaaaacgaatatccatgcaacactcagtgcatacaaagtggagttagcaga

SEQ ID NO: 3718 - DNA, 47 bp, synthetic construct
  misc_feature 1..47: note = iExon produced in gene CASC3
  source 1..47: mol_type = other DNA
gagaaagtttcctgtcttttggataaactactagagatgccatcaga

SEQ ID NO: 3719 - DNA, 131 bp, synthetic construct
  misc_feature 1..131: note = iExon produced in gene CASP7
  source 1..131: mol_type = other DNA
ggttgcagagagcactggttgaagcctatcctgaagctaccttggtagaggagttaattgcaccaggagacctaatttcagaaaggtcacagattatattccaccctccacaaaagtaacctggaagatga

SEQ ID NO: 3720 - DNA, 34 bp, synthetic construct
  misc_feature 1..34: note = iExon produced in gene CCDC122
  source 1..34: mol_type = other DNA
taacatattttattgaggtataattgtcataaga

SEQ ID NO: 3721 - DNA, 34 bp, synthetic construct
  misc_feature 1..34: note = iExon produced in gene CDH13
  source 1..34: mol_type = other DNA
gttttttgggaacaggtggtgtttggttacatga

SEQ ID NO: 3722 - DNA, 82 bp, synthetic construct
  misc_feature 1..82: note = iExon produced in gene CECR7
  source 1..82: mol_type = other DNA
cgagaggaagaggagaagcatgcaggagtgtacatgaaacaagattggccacgagatgacaaatatctgaatccgctgatga

SEQ ID NO: 3723 - DNA, 97 bp, synthetic construct
  misc_feature 1..97: note = iExon produced in gene CEP112
  source 1..97: mol_type = other DNA
aaccaacttcaagatggctgcagcagtgccaggcattctgcccagatctgcactattcggaggcagaaaagggctgccagtttctagggcctaatga

SEQ ID NO: 3724 - DNA, 83 bp, synthetic construct
  misc_feature 1..83: note = iExon produced in gene CMAHP
  source 1..83: mol_type = other DNA
aatgaacactccatgagagcagggacctgctttgccttgttcaccactttattcccagtggctagaaccacgtctgacacaga

SEQ ID NO: 3725 - DNA, 154 bp, synthetic construct
  misc_feature 1..154: note = iExon produced in gene CNRIP1
  source 1..154: mol_type = other DNA
gtcttactcttgtcaccgaggctggagtgcagtggtgtgatcatagctcactgcagcctcaacctcctggatccaagtgatcctcctgcctcagcctcccaagttgctggcactacaggtgtggtatcaccacacccggttaactaaaaaaaat

SEQ ID NO: 3726 - DNA, 136 bp, synthetic construct
  misc_feature 1..136: note = iExon produced in gene CNRIP1
  source 1..136: mol_type = other DNA
ttaaccgggtgtggtgataccacacctgtagtgccagcaacttgggaggctgaggcaggaggatcacttggatccaggaggttgaggctgcagtgagctatgatcacaccactgcactccagcctcggtgacaaga

SEQ ID NO: 3727 - DNA, 141 bp, synthetic construct
  misc_feature 1..141: note = iExon produced in gene CPSF4
  source 1..141: mol_type = other DNA
aagagacaggatttcaccgtgacagccaggatggtctccgtgccagccaggatggtctcgatctcctgaccttgtgatccgcccacctcggccttccaaagtgctgggattaccagcgtgatccactgcgcccggccatga

SEQ ID NO: 3728 - DNA, 259 bp, synthetic construct
  misc_feature 1..259: note = iExon produced in gene CRISPLD2
  source 1..259: mol_type = other DNA
attgggtcttatccccaagatatctcattatgtacatgcaaatcagcggagcatcgtcatgacaccaggaggacaccccgtgacgccgattaccgcactctcaacctcaacccagcgtcagagttttctggcatctcttctttgagcctggccgcctgcagctggaaatgctcatatatggtggtgtgactaacctgagagagagagatcagggatcctgagaagttctgcattcttggtctgcttcccagtgggacga

SEQ ID NO: 3729 - DNA, 61 bp, synthetic construct
  misc_feature 1..61: note = iExon produced in gene CRYBG3
  source 1..61: mol_type = other DNA
ggcctttctgtctggtgtgtgcagaatgatctgggtcacctctgaggcccatatttataga

SEQ ID NO: 3730 - DNA, 34 bp, synthetic construct
  misc_feature 1..34: note = iExon produced in gene CSNK1G1
  source 1..34: mol_type = other DNA
gttattggggtacagatggtgtttggttacatga

SEQ ID NO: 3731 - DNA, 227 bp, synthetic construct
  misc_feature 1..227: note = iExon produced in gene DAGLB
  source 1..227: mol_type = other DNA
ttggatcatcatcgctgccacagtggtttccattatcattgtctttgaccctcttggggggaaaatggctccatattcctctgccggccccagccacctggatagtcatgattcaagccagttacttaatggcctcaagacagcagctacaagcgtgtgggaaaccagaatcaagctcttgtgctgttgcattgggaaagacgaccatactcgggttgctttttcga

SEQ ID NO: 3732 - DNA, 178 bp, synthetic construct
  misc_feature 1..178: note = iExon produced in gene DCAF17
  source 1..178: mol_type = other DNA
ttttgccaaggagtttgtccacagagctcttcatgccctcatgctggaagtggaaatctggacatgttatcttatcatgtcattatcacacctaggaaaatgagcaacaattcttcaggatcatttaatgtcaagtttataacttcctgctttaacttaaaaaaaaaattaaattaga

SEQ ID NO: 3733 - DNA, 56 bp, synthetic construct
  misc_feature 1..56: note = iExon produced in gene DCUN1D4
  source 1..56: mol_type = other DNA
gccgaagatggtgttagtgattgcgagctgctggctggcacccttgcagagcagga

SEQ ID NO: 3734 - DNA, 158 bp, synthetic construct
  misc_feature 1..158: note = iExon produced in gene DDX42
  source 1..158: mol_type = other DNA
gtgcagtttgaacagggcttgacagtggctggaccatcactaagtgagactttaattcatcaagcataactgaaaatggaggcagtagattatatcttggtagccagcatgtgtagacttgtcttatttggagcccacttggaattttcatttcaaga

SEQ ID NO: 3735 - DNA, 59 bp, synthetic construct
  misc_feature 1..59: note = iExon produced in gene DENND1A
  source 1..59: mol_type = other DNA
ctgtggcataagaatgaaaagaaaagaaacaaaagcagatggcagagaaaacgaaagga

SEQ ID NO: 3736 - DNA, 131 bp, synthetic construct
  misc_feature 1..131: note = iExon produced in gene DENND5A
  source 1..131: mol_type = other DNA
gccaaaatcatattatatgatcaacctcaagtgcatgggaagctgtgaaagtgaacattgaactgggtataatgttaccctgaacagtatgaaggtctatgagcaagaaagaaggggtgaatgaattatga

SEQ ID NO: 3737 - DNA, 46 bp, synthetic construct
  misc_feature 1..46: note = iExon produced in gene DENND5A
  source 1..46: mol_type = other DNA
ataggacagcatttaaaaatctcatgtggaagaatataccactaga

SEQ ID NO: 3738 - DNA, 97 bp, synthetic construct
  misc_feature 1..97: note = iExon produced in gene DGKA
  source 1..97: mol_type = other DNA
acctgggcctcccaagcattatccagctcagttcctgcctggcacatggatggtgtggggcaggcatgcagtagcagctgatcttttaggaggaaga

SEQ ID NO: 3739 - DNA, 122 bp, synthetic construct
  misc_feature 1..122: note = iExon produced in gene DIAPH3
  source 1..122: mol_type = other DNA
gtaaattagacccaaaataactcccagggagcaatacacagcctggaaaacatgaaacaaggagcggctgtttggtgtaataaaggaggagcaccaggctgaattttcagaggcctaataga

SEQ ID NO: 3740 - DNA, 48 bp, synthetic construct
  misc_feature 1..48: note = iExon produced in gene DIAPH3
  source 1..48: mol_type = other DNA
ggttttgttcctaatgtcacatgtttcctaagtaattcagcataaaga

SEQ ID NO: 3741 - DNA, 80 bp, synthetic construct
  misc_feature 1..80: note = iExon produced in gene DLGAP4
  source 1..80: mol_type = other DNA
gagaggactagaaggaacggttcccacctctcggaggacaacggacccaaagcgatcgatgtgatggcaccctcctcaga

SEQ ID NO: 3742 - DNA, 164 bp, synthetic construct
  misc_feature 1..164: note = iExon produced in gene DNAJC13
  source 1..164: mol_type = other DNA
cccactgtggagacctactgctcaggaaaaaaagagctttcaaaatactactgctcgttggcaatgcacctggtcacccaagagctccgatggagatgtacaaggagattaatgttttcatgcctgctaatacagcatccattttgcagcccatggatcaagga

SEQ ID NO: 3743 - DNA, 82 bp, synthetic construct
  misc_feature 1..82: note = iExon produced in gene DNMBP
  source 1..82: mol_type = other DNA
tttgaaaatcaaatattgaatgcaaaagctaggaagctgtaaacaggaaacgtaaacgagaaagaacaagcagtgaatacga

SEQ ID NO: 3744 - DNA, 82 bp, synthetic construct
  misc_feature 1..82: note = iExon produced in gene DNMBP
  source 1..82: mol_type = other DNA
cattggccaggactactagaactgtgtcaaaacagctgctacactaacgggcatctttgtcttgttctcagtcttaaaaaga

SEQ ID NO: 3745 - DNA, 55 bp, synthetic construct
  misc_feature 1..55: note = iExon produced in gene DOCK1
  source 1..55: mol_type = other DNA
gaacgttggggatgcagatgaccagtatctagtgctgcgtgactttggattacga

SEQ ID NO: 3746 - DNA, 71 bp, synthetic construct
  misc_feature 1..71: note = iExon produced in gene DYRK1A
  source 1..71: mol_type = other DNA
gttcagggatgctggaaaggacactgaagtaggccttggctgatgggcctttcagaagtgaacacttaaga

SEQ ID NO: 3747 - DNA, 85 bp, synthetic construct
  misc_feature 1..85: note = iExon produced in gene EIF2B3
  source 1..85: mol_type = other DNA
ggaactgacttgttttccaatggaggaggaacatttgctgcctacactggtttgaagcattaaaaggggagaaaaagagctaaga

SEQ ID NO: 3748 - DNA, 92 bp, synthetic construct
  misc_feature 1..92: note = iExon produced in gene ENOX1
  source 1..92: mol_type = other DNA
ttactctagaagtcgtactacattttctgagagaagtaggaggtgagacgagagtaagtaacttctgctctctgaatatttcaattaggcag

SEQ ID NO: 3749 - DNA, 63 bp, synthetic construct
  misc_feature 1..63: note = iExon produced in gene ERC1
  source 1..63: mol_type = other DNA
acagacccttccagaaccagatgaccatcaagacaaaagcatactcaagcagacaagaaagga

SEQ ID NO: 3750 - DNA, 72 bp, synthetic construct
  misc_feature 1..72: note = iExon produced in gene ERCC1
  source 1..72: mol_type = other DNA
gtgactgaatgtctgaccaccgtgaagtcagtcaacaaaacggacagtcagaccctcctgaccacatttgga

SEQ ID NO: 3751 - DNA, 15 bp, synthetic construct
  misc_feature 1..15: note = iExon produced in gene ERGIC3
  source 1..15: mol_type = other DNA
tacatgctgtggaga

SEQ ID NO: 3752 - DNA, 98 bp, synthetic construct
  misc_feature 1..98: note = iExon produced in gene ERLIN2
  source 1..98: mol_type = other DNA
ggccaaaggaataactgggaaggtggatgcgaggccaacgaatcctaccttgaaactctgctcgcctgctggctctgccactccagcatctgaaagga

SEQ ID NO: 3753 - DNA, 108 bp, synthetic construct
  misc_feature 1..108: note = iExon produced in gene EVC
  source 1..108: mol_type = other DNA
ttccatacaactatcccgctgattctttcttcaaagaagcaaaccctcctttgctttttatattttcttcacacatggaaatgggggatgtggagggccttgcacaga

SEQ ID NO: 3754 - DNA, 69 bp, synthetic construct
  misc_feature 1..69: note = iExon produced in gene FAF1
  source 1..69: mol_type = other DNA
taatttttaacagtgtaaaggggtcctgagaccaaaaagtttgagaactgctgcaatcaactataaaga

SEQ ID NO: 3755 - DNA, 95 bp, synthetic construct
  misc_feature 1..95: note = iExon produced in gene FAIM
  source 1..95: mol_type = other DNA
gctggtctcgagttcctggcttcaaatgattctcctgtctcagcctctcaaagtgcggggattacagggatgagccaccatgcacactccaagga

SEQ ID NO: 3756 - DNA, 62 bp, synthetic construct
  misc_feature 1..62: note = iExon produced in gene FAM126A
  source 1..62: mol_type = other DNA
gtcaatttttctgaccacctgaacagattgttttctgtcaattaagggcagctttgttacga

SEQ ID NO: 3757 - DNA, 34 bp, synthetic construct
  misc_feature 1..34: note = iExon produced in gene FAM13A
  source 1..34: mol_type = other DNA
gttttggggaaacagatggtgtttgcttacatga

SEQ ID NO: 3758 - DNA, 58 bp, synthetic construct
  misc_feature 1..58: note = iExon produced in gene FAM174A
  source 1..58: mol_type = other DNA
actgctgtggaattcctgagaaagagcaactgagggatagcaacatggatttcactga

SEQ ID NO: 3759 - DNA, 101 bp, synthetic construct
  misc_feature 1..101: note = iExon produced in gene FAM198B
  source 1..101: mol_type = other DNA
cagcagcagcagcgtgtctttccatgcgcttggcattctttattttcccagcctgggaggatatgagagttccagggaaatgctgtattggacatgcaaga

SEQ ID NO: 3760 - DNA, 81 bp, synthetic construct
  misc_feature 1..81: note = iExon produced in gene FBN2
  source 1..81: mol_type = other DNA
gattaattaccgttaatgtcttggagactataacgtacactgcacgttgtaataacacaaaaggacaagcaagatgtaaga

SEQ ID NO: 3761 - DNA, 34 bp, synthetic construct
  misc_feature 1..34: note = iExon produced in gene FER
  source 1..34: mol_type = other DNA
gtttctggggagcaggtggtgtttgcttacatga

SEQ ID NO: 3762 - DNA, 92 bp, synthetic construct
  misc_feature 1..92: note = iExon produced in gene FHOD3
  source 1..92: mol_type = other DNA
gacaaaaagcaaagaagaagactgtggtctagaagccgaaggaagatgagaaggaagagtgtccgaggagtcagccacagccagaaaggaga

SEQ ID NO: 3763 - DNA, 47 bp, synthetic construct
  misc_feature 1..47: note = iExon produced in gene FOCAD
  source 1..47: mol_type = other DNA
cattgactccgttatctacacaataaaatctggatccacagataaga

SEQ ID NO: 3764 - DNA, 34 bp, synthetic construct
  misc_feature 1..34: note = iExon produced in gene GALC
  source 1..34: mol_type = other DNA
gtttttggagaataggtggtatttggttacatga

SEQ ID NO: 3765 - DNA, 103 bp, synthetic construct
  misc_feature 1..103: note = iExon produced in gene GCFC2
  source 1..103: mol_type = other DNA
caagagagaaagagaggaatcaagaatgggtccattgaggaattggcctgagcaactggaaggacagaggtgccatttcctgaaatgaaaaagtctgacagga

SEQ ID NO: 3766 - DNA, 96 bp, synthetic construct
  misc_feature 1..96: note = iExon produced in gene GGACT
  source 1..96: mol_type = other DNA
taagatgctatgaggaaatccgtgcacgagggatgacagcgtggcaggctggaacacgctttttagatttactttcgtggactggatctgttaaga

SEQ ID NO: 3767 - DNA, 58 bp, synthetic construct
  misc_feature 1..58: note = iExon produced in gene GLCE
  source 1..58: mol_type = other DNA
ggcagaggtggagaggggttagattatttcatctgccctacagttggcataataaaga

SEQ ID NO: 3768 - DNA, 116 bp, synthetic construct
  misc_feature 1..116: note = iExon produced in gene GOLGA4
  source 1..116: mol_type = other DNA
gtccagggattgaaggctggggagtagagccatcctgggtcaggctgctggtaggagcggtgggacctgaaagacgtggcggcgtggccggcgtccagcgcccgaggctgtcacga

SEQ ID NO: 3769 - DNA, 47 bp, synthetic construct
  misc_feature 1..47: note = iExon produced in gene GOLGB1
  source 1..47: mol_type = other DNA
aggtgcctgatgctgttaattcctgagccttttgaagattctgcaga

SEQ ID NO: 3770 - DNA, 64 bp, synthetic construct
  misc_feature 1..64: note = iExon produced in gene GXYLT1
  source 1..64: mol_type = other DNA
ggattgtttgtattcctgccaatgatttgtgagacagtctgttccccacatcctcgtcaacaga

SEQ ID NO: 3771 - DNA, 76 bp, synthetic construct
  misc_feature 1..76: note = iExon produced in gene HAT1
  source 1..76: mol_type = other DNA
ttcgttttcctgaagatcttgaaaatgacattagaactttctttcctgagtatacccatcaactctttggggatga

SEQ ID NO: 3772 - DNA, 100 bp, synthetic construct
  misc_feature 1..100: note = iExon produced in gene HLTF
  source 1..100: mol_type = other DNA
tcttgctctgtcgcccaggctggagtgcaatggcgcgatctcagctcactgcaacctccacctcccaggttcaagtgatcctgctgcctcagcctcttga

SEQ ID NO: 3773 - DNA, 16 bp, synthetic construct
  misc_feature 1..16: note = iExon produced in gene HMGA2
  source 1..16: mol_type = other DNA
cttgttgggaataaga

SEQ ID NO: 3774 - DNA, 290 bp, synthetic construct
  misc_feature 1..290: note = iExon produced in gene HNMT
  source 1..290: mol_type = other DNA
ataccagaattgctgttaacaaataaaatactggccagatgtgttggttcacgcctgtaatcctagcacttcgggaggctgaggcgggaggattacttgagcctaggagtttgagaccagcctgggcaacatagcaagatcccatctctacaaaaaagtgaaaaagttagctgaacaaggcggcatgcacatgctactccagacgctgaagtgggaagatcacttaagtccgagagatcgaggcttcagtgagatatggctgagacactgctctcagcctggatgacaga

SEQ ID NO: 3775 - DNA, 143 bp, synthetic construct
  misc_feature 1..143: note = iExon produced in gene HPS1
  source 1..143: mol_type = other DNA
tttggagaatgcctgttcattgccatcaatggtgaccacaccgagagcgagggggacctgcggcggaagctgtatgtgctcaagtacctgtttgaagtgcactttgggctggtgactgtggacggtcatcttatccgaaagga

SEQ ID NO: 3776 - DNA, 34 bp, synthetic construct
  misc_feature 1..34: note = iExon produced in gene HSD17B12
  source 1..34: mol_type = other DNA
gttattggggaacaggtggtgtttggttacatga

SEQ ID NO: 3777 - DNA, 78 bp, synthetic construct
  misc_feature 1..78: note = iExon produced in gene HSD17B4
  source 1..78: mol_type = other DNA
ctttctgacatcttaacgaggcaatacagagagacgaattttcatcagtttgttcagggagacacatataacaaaaga

SEQ ID NO: 3778 - DNA, 115 bp, synthetic construct
  misc_feature 1..115: note = iExon produced in gene HTT
  source 1..115: mol_type = other DNA
aggcaagccctggtgctgtgggagccccaaggaagagcctctggcctggtggccacgtagcccaggagagatttctacaggagcccacagcgctgaaggagagagaggcagcaga

SEQ ID NO: 3779 - DNA, 51 bp, synthetic construct
  misc_feature 1..51: note = iExon produced in gene IFT57
  source 1..51: mol_type = other DNA
atccatacatacttaatgctgaaatgtgaagggctgagaaaaaagaaaaga

SEQ ID NO: 3780 - DNA, 231 bp, synthetic construct
  misc_feature 1..231: note = iExon produced in gene INPP5K
  source 1..231: mol_type = other DNA
cacatacatcaggaggtctgcctgatcccatggtgaaccccgggaatccgaaatcagattgagataagatcctttagggaagtgacttagcctggtctcttgcctgctctttcacggggaacaacgctaatcgcccacttagtctaagtcacgatgcttggatttgctgctaatcgtcggatttgagagtgggaacaagaaatccggacttttgctctccatcctcttaga

SEQ ID NO: 3781 - DNA, 95 bp, synthetic construct
  misc_feature 1..95: note = iExon produced in gene IVD
  source 1..95: mol_type = other DNA
ctctgaatggcctgtctcctggacaaagaagctttcacggactactctgcagggaggtgacattggaccagagctgactccacctgggggaaaga

SEQ ID NO: 3782 - DNA, 181 bp, synthetic construct
  misc_feature 1..181: note = iExon produced in gene KIAA1524
  source 1..181: mol_type = other DNA
gtcaggaattatggttaaaggtggattttcactgatggtaataagatattactttataccccttccctcctcatgaattaagtccatctaatctttactgaggacctgctgagtggtagacactatgatttgtttctgtttccacagatgtcacaattgtcagtaattgtggacctttaga

SEQ ID NO: 3783 - DNA, 219 bp, synthetic construct
  misc_feature 1..219: note = iExon produced in gene KIAA1715
  source 1..219: mol_type = other DNA
ttctcaggttttcttgacaccaagaaagagagggaatcaagaagatcggttgtaagagagcaattcaacatgaaaatactgaagaagagatgggagagagagagagataattgttttcttcagagttttccactttctatcagtaactctgatcacatggatatctattgtggggctagttgatgcatcccttcagatgtgttggaaagaggaccaaga

SEQ ID NO: 3784 - DNA, 52 bp, synthetic construct
  misc_feature 1..52: note = iExon produced in gene LUC7L3
  source 1..52: mol_type = other DNA
tgtaggaaagcaagttggtgctagatgactccttttaggactttaagaaaga

SEQ ID NO: 3785 - DNA, 82 bp, synthetic construct
  misc_feature 1..82: note = iExon produced in gene LYRM1
  source 1..82: mol_type = other DNA
gtgaagtagtatttgaagcttttcatcagttggctcattctttactcaagaataaacctcaagaaacgtcatcagggtcaga

SEQ ID NO: 3786 - DNA, 54 bp, synthetic construct
  misc_feature 1..54: note = iExon produced in gene MADD
  source 1..54: mol_type = other DNA
aattgtggaacaagcaccaggaagtgaaaaagcaaaaagctttggaaaaacaga

SEQ ID NO: 3787 - DNA, 79 bp, synthetic construct
  misc_feature 1..79: note = iExon produced in gene MB21D2
  source 1..79: mol_type = other DNA
gcatgtttatgtgggaatgtctctccatgtttacaaacttcagaaggcccctttgggaaagaaaacctctcagagaaga

SEQ ID NO: 3788 - DNA, 99 bp, synthetic construct
  misc_feature 1..99: note = iExon produced in gene MCM10
  source 1..99: mol_type = other DNA
tcttgctctgttgccaggctagagtgcagtggcgcagtcttggctcgctacagcctctgcctcctgggttcaagcgatcctcctgcctcagcctcacga

SEQ ID NO: 3789 - DNA, 92 bp, synthetic construct
  misc_feature 1..92: note = iExon produced in gene MED13L
  source 1..92: mol_type = other DNA
gtcatttttaacatggattcttagatgctgacaaatattgccaaattccattccaaaagaggttacacttatttcctttcatcagtgaatga

SEQ ID NO: 3790 - DNA, 96 bp, synthetic construct
  misc_feature 1..96: note = iExon produced in gene MED13L
  source 1..96: mol_type = other DNA
ctcctctgagtgttcctccaaatctgtcttttggagtagacctagaaatcatctgttactaaggtgtactatgcatgtggaaccattgatttaaga

SEQ ID NO: 3791 - DNA, 175 bp, synthetic construct
  misc_feature 1..175: note = iExon produced in gene MEDAG
  source 1..175: mol_type = other DNA
gagaggccaggaacagaatgcccagtaacaagaagtgctcattagaacatctgaagcccacgtgttctttggcttgattataaccagaaagccagatagttctttaggaatgtaattcacagctgtatcaagtacacctcctgcaccgatcactcaggaggaatctaaaaaaaga

SEQ ID NO: 3792 - DNA, 53 bp, synthetic construct
  misc_feature 1..53: note = iExon produced in gene MEMO1
  source 1..53: mol_type = other DNA
aaagcgtgctctggaatggattcacaaatgagctaccctccttccctcaaaga

SEQ ID NO: 3793 - DNA, 135 bp, synthetic construct
  misc_feature 1..135: note = iExon produced in gene MMS19
  source 1..135: mol_type = other DNA
cattaatttacagaaatacacgtattctccttgttttggtggaagctgcagctgccaatcatctctcaaaccctgtgggtagctgctaagctgtatttcagaggaatgtcacaatcataccactggggagaaaga

SEQ ID NO: 3794 - DNA, 75 bp, synthetic construct
  misc_feature 1..75: note = iExon produced in gene MRPL45
  source 1..75: mol_type = other DNA
gtctgggtggtggctcatacccgtaatccagcacttttggaggccgaagtgggaggattgtttctgggcagcaga

SEQ ID NO: 3795 - DNA, 122 bp, synthetic construct
  misc_feature 1..122: note = iExon produced in gene MRPS28
  source 1..122: mol_type = other DNA
atgggacctgcaaaggataaactggtcattggacggatctttcatattgtggagaatgatctgtacatagattttggtggaaagtttcattgtgtatgtagaagaccagaagtggatggaga

SEQ ID NO: 3796 - DNA, 42 bp, synthetic construct
  misc_feature 1..42: note = iExon produced in gene MTERF3
  source 1..42: mol_type = other DNA
ggacgtgtctccgtgctaaagacctagagattacaacgatga

SEQ ID NO: 3797 - DNA, 89 bp, synthetic construct
  misc_feature 1..89: note = iExon produced in gene MYCBP2
  source 1..89: mol_type = other DNA
gcatctagcatagaactccctattctgcattatgactactggaccacttatctctctgccctacttgataagttccatgaggacaaaga

SEQ ID NO: 3798 - DNA, 156 bp, synthetic construct
  misc_feature 1..156: note = iExon produced in gene MYCBP2
  source 1..156: mol_type = other DNA
gtgaccaactgagtgccatattgaattccattcagtcacgacccaatctcccagctccttccatctttgatcaagctgcaaaacctccctcttccctagtacacagcccatttgtgttcggacagcccctttccttccagcagcctcagcttcaga

SEQ ID NO: 3799 - DNA, 118 bp, synthetic construct
  misc_feature 1..118: note = iExon produced in gene MYOF
  source 1..118: mol_type = other DNA
ggtgagaagtttctgaaggtgcttgaacgctcttcttccacacgagggcaccaagttgaagcgggaagaacactgagccatcagttagaaggctcaggatatggtccagttctaacga

SEQ ID NO: 3800 - DNA, 74 bp, synthetic construct
  misc_feature 1..74: note = iExon produced in gene NREP
  source 1..74: mol_type = other DNA
tgttccagggcgccattaacgattggagttggcacaaaatttgaaactagaagtggactatttgctccttgaga

SEQ ID NO: 3801 - DNA, 84 bp, synthetic construct
  misc_feature 1..84: note = iExon produced in gene NSUN4
  source 1..84: mol_type = other DNA
gggctcaggagtccagcggtcctaagtataccttgcagccatcttcctaaaagttctgaccatgactgaggacactgagaagga

SEQ ID NO: 3802 - DNA, 49 bp, synthetic construct
  misc_feature 1..49: note = iExon produced in gene NT5C2
  source 1..49: mol_type = other DNA
agttttggtcttaactgaaacagtcaaacaaacccactaattgaaaaga

SEQ ID NO: 3803 - DNA, 47 bp, synthetic construct
  misc_feature 1..47: note = iExon produced in gene OSMR
  source 1..47: mol_type = other DNA
cttcctgagagtttcttggcctatacccagctgaagtgcagggaaga

SEQ ID NO: 3804 - DNA, 75 bp, synthetic construct
  misc_feature 1..75: note = iExon produced in gene OXCT1
  source 1..75: mol_type = other DNA
attttgaaagaagtctgtctctcaaatatttaaagaatcaaaatgatgtcgtattaaagcttgacaagctaatga

SEQ ID NO: 3805 - DNA, 63 bp, synthetic construct
  misc_feature 1..63: note = iExon produced in gene PAPD4
  source 1..63: mol_type = other DNA
agctctacctctgttttgaaatgtcattagtttggatatgttaccaggatgcagcaaagaaga

SEQ ID NO: 3806 - DNA, 103 bp, synthetic construct
  misc_feature 1..103: note = iExon produced in gene PCM1
  source 1..103: mol_type = other DNA
ttatggaccagcatttccatcttttactggcctgaaataatataataaaatctttaagccaccataagatatctaaggaaaataactgtatgtggtttaaaga

SEQ ID NO: 3807 - DNA, 141 bp, synthetic construct
  misc_feature 1..141: note = iExon produced in gene PDS5B
  source 1..141: mol_type = other DNA
gcattagaaacattcatattatgaaaatactacctttttattctcacttggtgtactgatgtgcattacggtggagagcagtaggctgcagattttgtgctgcatagcctgagcagcaccgtgttatagtttgacataaga

SEQ ID NO: 3808 - DNA, 190 bp, synthetic construct
  misc_feature 1..190: note = iExon produced in gene PIK3R1
  source 1..190: mol_type = other DNA
tgctctacaagtatagaaagaagccttcctcttcccaccgtccccagacaccacataatggaaaaagcaagaattttctgcataagcaaggccttaaaaaaaaaaaagccagcctctgatgggacttctttcctgccagaaatcccactggtccactgtcgcaatttttacaaaaggccacgatgaaaga

SEQ ID NO: 3809 - DNA, 66 bp, synthetic construct
  misc_feature 1..66: note = iExon produced in gene PIKFYVE
  source 1..66: mol_type = other DNA
tggaaagaacctcatttgagctatgcttggtcacagacctagagaaagttcacggggaagtaaaga

SEQ ID NO: 3810 - DNA, 202 bp, synthetic construct
  misc_feature 1..202: note = iExon produced in gene PITPNB
  source 1..202: mol_type = other DNA
gcgaaaatgggcagtgtttacaggcatgaatgctggtggaaagagcagagtaagggcagattgcacaagaaccgtggaggccctggttcccatcacctccacctcagcacagacttcagagaggagaggaggcactggatgcatgacagcagcacttgagataggtgctccaggtggaaggcactgcacatgcaaaggctga

SEQ ID NO: 3811 - DNA, 47 bp, synthetic construct
  misc_feature 1..47: note = iExon produced in gene PITPNB
  source 1..47: mol_type = other DNA
tgagcttggagtgaagtctagtacgtctgtgcagcaaagagaccaga

SEQ ID NO: 3812 - DNA, 49 bp, synthetic construct
  misc_feature 1..49: note = iExon produced in gene PLSCR1
  source 1..49: mol_type = other DNA
gaccacataaacccattttgaattattcaaccattgctgaacttcttga

SEQ ID NO: 3813 - DNA, 92 bp, synthetic construct
  misc_feature 1..92: note = iExon produced in gene PMS1
  source 1..92: mol_type = other DNA
ggattcccccagcagacgtttttcatctaagaaatggcttgagtgcttccttttatcgggtgctgtgatagattctcaaaatatgaaaatga

SEQ ID NO: 3814 - DNA, 33 bp, synthetic construct
  misc_feature 1..33: note = iExon produced in gene PPIP5K2
  source 1..33: mol_type = other DNA
aacccaacacagatcttaataccatgaaaagga

SEQ ID NO: 3815 - DNA, 181 bp, synthetic construct
  misc_feature 1..181: note = iExon produced in gene PRSS23
  source 1..181: mol_type = other DNA
agcaatctctttgtatttatacaattatgacaacagtagtaagagaagaaggttcagaggatacaaggtaacacacctacataaacgacctactgggtacaaatattgtaaatcaacataggcctagaaaaggtggtcagatgctgaattttgactaaatacctccgatggcacataatga

SEQ ID NO: 3816 - DNA, 48 bp, synthetic construct
  misc_feature 1..48: note = iExon produced in gene PRUNE2
  source 1..48: mol_type = other DNA
aactagctgcctttacaatgatccagaaatgtcttctatggagaagga

SEQ ID NO: 3817 - DNA, 67 bp, synthetic construct
  misc_feature 1..67: note = iExon produced in gene PSMA4
  source 1..67: mol_type = other DNA
agagacgcaacatccacaagcttcttgatgaagtctttttttctgaaaaaatttataaactcaatga

SEQ ID NO: 3818 - DNA, 96 bp, synthetic construct
  misc_feature 1..96: note = iExon produced in gene PXK
  source 1..96: mol_type = other DNA
ctgtaaagtttgactgagaaatgttgcatcagccctgaagtttattgagaaaatcttacgctgatgcaaactttttggactgttagtgtcttatga

SEQ ID NO: 3819 - DNA, 60 bp, synthetic construct
  misc_feature 1..60: note = iExon produced in gene RAF1
  source 1..60: mol_type = other DNA
aataacaacctgagtgcttctcccagggcgtggtccagacgattttgtttgaggggaaga

SEQ ID NO: 3820 - DNA, 138 bp, synthetic construct
  misc_feature 1..138: note = iExon produced in gene RARS2
  source 1..138: mol_type = other DNA
aattggagaaattagtacttgtggcatagattgttgtgcggtcagctcttactgttcttgagcagcattttaagagaagaaatgacaggacttgatgaaaaagtataagaaatatacagtataaaaaaagctatatga

SEQ ID NO: 3821 - DNA, 116 bp, synthetic construct
  misc_feature 1..116: note = iExon produced in gene RFWD2
  source 1..116: mol_type = other DNA
gactaagatttgaatttattatgtatatgaagatcttaaaatttaagccattagctaaagaaactattggaggagatcttttattgtattctgtcagctgtttaactcagtaatga

SEQ ID NO: 3822 - DNA, 77 bp, synthetic construct
  misc_feature 1..77: note = iExon produced in gene RNFT1
  source 1..77: mol_type = other DNA
gaatttctcttggaattgggctgctaacaacttttatgtatgcaaacaaaagcattgtaaatcaggtttttctaaga

SEQ ID NO: 3823 - DNA, 59 bp, synthetic construct
  misc_feature 1..59: note = iExon produced in gene RPA1
  source 1..59: mol_type = other DNA
acgtcagctatcagtttaagcattacttctatgcctagtttgctgagactttataatga

SEQ ID NO: 3824 - DNA, 41 bp, synthetic construct
  misc_feature 1..41: note = iExon produced in gene RPS6KB2
  source 1..41: mol_type = other DNA
gacgcatgtccccttgccgagttgagggcagctggcctaga

SEQ ID NO: 3825 - DNA, 102 bp, synthetic construct
  misc_feature 1..102: note = iExon produced in gene SAMD4A
  source 1..102: mol_type = other DNA
atgtgatgggaagtctctggaagagttgagaaggagaatgaaggcgcttcattgacccttgaaaatgaccactctgaatgcggcacagagagtaatgaaaga

SEQ ID NO: 3826 - DNA, 118 bp, synthetic construct
  misc_feature 1..118: note = iExon produced in gene SAR1A
  source 1..118: mol_type = other DNA
tgcatctaagtggcattctgattcacattattgataagactgatttcctagagttgttcttcactggatgacagcagtcgtatgtctagggaatgtgaatgaaccgctgcctggagga

SEQ ID NO: 3827 - DNA, 60 bp, synthetic construct
  misc_feature 1..60: note = iExon produced in gene SCO1
  source 1..60: mol_type = other DNA
agaaaggatttgaacttggccttcatgtatcaactaagttaatcgagccttgaattgaga

SEQ ID NO: 3828 - DNA, 112 bp, synthetic construct
  misc_feature 1..112: note = iExon produced in gene SEC24A
  source 1..112: mol_type = other DNA
agaccgggtctctcgttgtcacccaggttagagtgcagttccatgatcatagctcactgcagccttgaactcttgggctcaagcagtcctcctgcctcagcctccagacaga

SEQ ID NO: 3829 - DNA, 65 bp, synthetic construct
  misc_feature 1..65: note = iExon produced in gene SERGEF
  source 1..65: mol_type = other DNA
gtgtcttcaaaaacaaacatatttaaaagattttacttctcatctccaggaagaaccagctagga

SEQ ID NO: 3830 - DNA, 53 bp, synthetic construct
  misc_feature 1..53: note = iExon produced in gene SH3YL1
  source 1..53: mol_type = other DNA
gtaacagaaatgaatataagctctatcctggactttccagctatcatgagaga

SEQ ID NO: 3831 - DNA, 100 bp, synthetic construct
  misc_feature 1..100: note = iExon produced in gene SKA2
  source 1..100: mol_type = other DNA
aaaaatccagttacactcttaaaggaattgtcagtgataaagtctcgatatcaaactttgtatgcccgctttaaaccagttgctgttgagcagaaagaga

SEQ ID NO: 3832 - DNA, 76 bp, synthetic construct
  misc_feature 1..76: note = iExon produced in gene SMYD3
  source 1..76: mol_type = other DNA
ctatatcagaaaagcaggaaaccagagaaaatatacctatttgaaagtggcatgtcagctgggatgagagagaaga

SEQ ID NO: 3833 - DNA, 36 bp, synthetic construct
  misc_feature 1..36: note = iExon produced in gene SNAP23
  source 1..36: mol_type = other DNA
tattggaatatgacagggaagatgaattcactatga

SEQ ID NO: 3834 - DNA, 90 bp, synthetic construct
  misc_feature 1..90: note = iExon produced in gene SNHG16
  source 1..90: mol_type = other DNA
aggcctttctttgtttggcatctgcagagacggtgaaaagcagagctccaggttgaaggatcagagtaatagatggagcccttaacatga

SEQ ID NO: 3835 - DNA, 144 bp, synthetic construct
  misc_feature 1..144: note = iExon produced in gene SNX7
  source 1..144: mol_type = other DNA
agtttgcaaaggaaggaaaggagcagagacttgaatgagcagaaaatcatttcagggcctgttctctatgtccttgctatccctgtcttctgtagctattctgaaaccatcaacaaaggagcacaccattccatcagcaaaaga

SEQ ID NO: 3836 - DNA, 64 bp, synthetic construct
  misc_feature 1..64: note = iExon produced in gene SPATA5
  source 1..64: mol_type = other DNA
aacctttatataaatggaatcatactgtatacaaccttttggaattagcttttttcacatatga

SEQ ID NO: 3837 - DNA, 114 bp, synthetic construct
  misc_feature 1..114: note = iExon produced in gene SPIDR
  source 1..114: mol_type = other DNA
gtattcagtagaagcagatgaacagccagatgaagagatggatagagcaagacatggacattataaaggaattcaatagaagcacatgaacggccagatgaagagatggataga

SEQ ID NO: 3838 - DNA, 129 bp, synthetic construct
  misc_feature 1..129: note = iExon produced in gene SPRYD7
  source 1..129: mol_type = other DNA
gtgtggttgtacgtgcctgtagtcccagctacttgagaggctgagctgagaggatctcttgagccggggaggtcaagtctcctgtgagcagtgatcatcgtgccgctgcactccagccttggcaccaga

SEQ ID NO: 3839 - DNA, 70 bp, synthetic construct
  misc_feature 1..70: note = iExon produced in gene SRGAP1
  source 1..70: mol_type = other DNA
tcacagataccacgtgttaatatctaaagtagaaaaaggaataaagcaaaggaggacaaaaagaaaagga

SEQ ID NO: 3840 - DNA, 79 bp, synthetic construct
  misc_feature 1..79: note = iExon produced in gene STAT1
  source 1..79: mol_type = other DNA
gtttgttatctgcagatcaaggatgtgagtcaatgtaatctgcaacccgttcttggaaggaatcacatttcccacagga

SEQ ID NO: 3841 - DNA, 99 bp, synthetic construct
  misc_feature 1..99: note = iExon produced in gene STXBP6
  source 1..99: mol_type = other DNA
gtggtccctgagttaagaacatgcaatggcactctctcaaggagaggaaggagccaaagaagaaagaggtccaaagcagaaaagagcagacagctaaga

SEQ ID NO: 3842 - DNA, 99 bp, synthetic construct
  misc_feature 1..99: note = iExon produced in gene SUPT20H
  source 1..99: mol_type = other DNA
ttgaagacgataattctaacttcctgtcagttgaagacgataattctaacttcctgtcagttgaagacgataattctaacttcacacttaattaaaaga

SEQ ID NO: 3843 - DNA, 156 bp, synthetic construct
  misc_feature 1..156: note = iExon produced in gene TAF2
  source 1..156: mol_type = other DNA
gaagatgatcaccttgccaaggaagcatcatgtaatatatcagctcatcagcagggagtgaagaggaagtctgatacaccactggggtccccactagaacctggtcaaatactggagaagaatgaggatagcagtaaagtcaaactcaaaatcaga

SEQ ID NO: 3844 - DNA, 83 bp, synthetic construct
  misc_feature 1..83: note = iExon produced in gene TAF2
  source 1..83: mol_type = other DNA
ttttgagatccaccaaatatgtcattgttgccagtcttctttcccaagatgtatggatagtttttaatgtctcataaatatga

SEQ ID NO: 3845 - DNA, 162 bp, synthetic construct
  misc_feature 1..162: note = iExon produced in gene TBC1D15
  source 1..162: mol_type = other DNA
tttgacagacctgaaatcaatcaagcaaaacaaagagggtatgggctggtcctatttggtattctgtctaaaggatgacgtcgttctccctgctctacactttcatcaaggagatagcaaactactgattgaatctcttgaaaaatatgtggtattgtgtga

SEQ ID NO: 3846 - DNA, 34 bp, synthetic construct
  misc_feature 1..34: note = iExon produced in gene TCF12
  source 1..34: mol_type = other DNA
gtttttggggaacaggtggtatttggtgacatga

SEQ ID NO: 3847 - DNA, 87 bp, synthetic construct
  misc_feature 1..87: note = iExon produced in gene TJP2
  source 1..87: mol_type = other DNA
ggattggtgtctctatcatccagctggccattaaacaaccaaagcttcatcatcctagataacctgtgagctctcagaggagacaga

SEQ ID NO: 3848 - DNA, 149 bp, synthetic construct
  misc_feature 1..149: note = iExon produced in gene TMEM189-UBE2V1
  source 1..149: mol_type = other DNA
gagtaaaagtccctcgcaatttccgactgttggaagaactcgaagaaggccagaaaggagtaggagatggcacagttagctggggtctagaagatgacgaagacatgacacttacaagatggacagggatgataattgggcctccaaga

SEQ ID NO: 3849 - DNA, 39 bp, synthetic construct
  misc_feature 1..39: note = iExon produced in gene TMEM214
  source 1..39: mol_type = other DNA
ccatcctagatctgagatttgcaacctggaagttcaaga

SEQ ID NO: 3850 - DNA, 134 bp, synthetic construct
  misc_feature 1..134: note = iExon produced in gene TNS3
  source 1..134: mol_type = other DNA
gcaggcccacccatgaaacatacacgacaccacagagacctccctgaaggtccctcaactgcatggacatgtagttcttccagccaagcagagggatcccggccaggtccccactgatccagtttgcaaaaaga

SEQ ID NO: 3851 - DNA, 34 bp, synthetic construct
  misc_feature 1..34: note = iExon produced in gene TOE1
  source 1..34: mol_type = other DNA
gtttatggggaacaggtggtgtttggttaaatga

SEQ ID NO: 3852 - DNA, 76 bp, synthetic construct
  misc_feature 1..76: note = iExon produced in gene TRAF3
  source 1..76: mol_type = other DNA
caccaatacattattatgaagtcagtacagagagattggcatcttagtattttctgaggaagagaacagccaaaga

SEQ ID NO: 3853 - DNA, 35 bp, synthetic construct
  misc_feature 1..35: note = iExon produced in gene TSPAN2
  source 1..35: mol_type = other DNA
gttttgtggggaacaggtggtgtttggttacatga

SEQ ID NO: 3854 - DNA, 58 bp, synthetic construct
  misc_feature 1..58: note = iExon produced in gene TUBE1
  source 1..58: mol_type = other DNA
agtggttggtgatggtggaagtatttccaagggaaaaatatgttctttaaaagcacga

SEQ ID NO: 3855 - DNA, 51 bp, synthetic construct
  misc_feature 1..51: note = iExon produced in gene TYW5
  source 1..51: mol_type = other DNA
tgacagcatgaactgtcagaagctttgagttcaagcatcttgggagcaaga

SEQ ID NO: 3856 - DNA, 149 bp, synthetic construct; identical to SEQ ID NO: 3848
  misc_feature 1..149: note = iExon produced in gene UBE2V1
  source 1..149: mol_type = other DNA

SEQ ID NO: 3857 - DNA, 80 bp, synthetic construct
  misc_feature 1..80: note = iExon produced in gene URGCP
  source 1..80: mol_type = other DNA
gctttggggcagtggtcatttccgggaccaggccttttcattgccagctgactacccagcactttgagctcatgaataga

SEQ ID NO: 3858 - DNA, 111 bp, synthetic construct
  misc_feature 1..111: note = iExon produced in gene XRN2
  source 1..111: mol_type = other DNA
gtggtttgaattgagaagggaagtatagcaaaagcttgagaaagccttaccgtctggagtttggactgtatcctataggcaatgagtagtcatgaaaatgatttgagagga

SEQ ID NO: 3859 - DNA, 54 bp, synthetic construct
  misc_feature 1..54: note = iExon produced in gene XRN2
  source 1..54: mol_type = other DNA
ccatcaacaactcttagctgaaagagggataaggcccaagcaaggatagagaga

SEQ ID NO: 3860 - DNA, 40 bp, synthetic construct
  misc_feature 1..40: note = iExon produced in gene ZNF232
  source 1..40: mol_type = other DNA
gtgagagactttgcctgtttcatcactcataaaattagga

SEQ ID NO: 3861 - DNA, 188 bp, synthetic construct
  misc_feature 1..188: note = iExon produced in gene ZNF680
  source 1..188: mol_type = other DNA
gcagaactggccgtgaactgtggctcagggagctggaactgagtcatcgaactgcttcagaaaccacagtaaaggacaaggtctgcaggcctgcctgcgtggctataaatggctgtcttcctccaggcctctggaagggcacggtctctcccagactgtggctgggaggagtttgggatgattagaga

SEQ ID NO: 3862-3866 - skipped (5 entries)
